(19) United States
(12) Patent Application Publication
(10) Pub. No.: US 2009/0029346 A1
(43) Pub. Date: Jan. 29, 2009

(54) Detection of human papilloma virus

(75) Inventors: Douglas Spencer Millar, New South Wales (AU); George Gabor L. Miklos, New South Wales (AU); John Robert Melki, New South Wales (AU)

Correspondence Address: KNOBBE MARTENS OLSON & BEAR LLP, 2040 MAIN STREET, FOURTEENTH FLOOR, IRVINE, CA, 92614, US

(73) Assignee: Human Genetic Signatures Pty., Ltd., Macquarie Park, NSW (AU)

(21) Appl. No.: 11/660,586

(22) PCT Filed: Dec. 22, 2005
(86) PCT No.: PCT/AU2005/001963

§ 371 Date: Aug. 7, 2008

Related U.S. Application Data
(60) Provisional application No. 60/638,625, filed on Dec. 23, 2004.

(51) Int. Cl. C12Q 1/70

(52) U.S. Cl. 435/5

(57) ABSTRACT

An assay for detecting HPV comprising treating the viral nucleic acid with an agent that modifies cytosine to form derivative viral nucleic acid, amplifying at least a part of the derivative viral nucleic acid to form an HPV-specific nucleic acid molecule, and looking for the presence of an HPV-specific nucleic acid molecule, wherein detection of the HPV-specific nucleic acid molecule is indicative HPV.

### TECHNICAL FIELD

[0001] The invention relates to assays for detection of human papilloma virus.

### BACKGROUND ART

### Human Papilloma Virus

[0002] It has been challenging to implement reliable and robust DNA-based detection systems that recognise all the different HPV types in a single assay, since not only are there cross hybridization problems between different HPV genomic types, but the exact classification of what constitutes an HPV type is dependent upon genomic sequence similarities which have significant bioinformatic limitations. Thus, while new HPV types have been defined as ones where there is less than 90% sequence similarity with previous HPV types, finer taxonomic subdivisions are more problematic to deal with. Thus, a new HPV ‘subtype’ is defined when the DNA sequence similarity is in the 90-98% range relative to previous subtypes. A new ‘variant’ is defined when the sequence similarity is between 98-100% of previous variants (1993, Van Rast, M. A., et al., Papillomavirus Rep, 4, 61-65; 1998, Southern, S. A. and Herrington, C. S. Sex. Transm. Inf. 74, 101-109). This spectrum can broaden further to the point where variation could be measured based on comparing single genomes from single isolated viral particles. In such a case, a ‘genotype’ would be any fully sequenced HPV genome that minimally differs by one base from any other fully sequenced HPV genome. This includes all cases where a single base at a defined position can exist in one of four states, G, A, T or C, as well as cases where the base at that given position has been altered by deletion, addition, amplification or transposition to another site.

[0003] The difficulties faced by existing HPV detection systems in the context of disease risk assessment are largely threefold. First limitations of the technology systems themselves. Secondly, limitations of the pathological interpretations of diseased cell populations. Thirdly, limitations at the clinical level of assessing disease progression in different human populations that are subject to differences in genetic background as well as contributing cofactors.

### Clinical Detection of Cervical Abnormalities

[0004] HPVs of certain types are implicated in cancers of the cervix and contribute to a more poorly defined fraction of cancers of the vagina, vulvae, penis and anus. The ring of tissue that is the cervical transformation zone is an area of high susceptibility to HPV carcinogenicity, and assessment of its state from complete cellular normalcy to invasive carcinoma has been routinely evaluated using visual or microscopic criteria via histological, cytological and molecular biological methodologies. The early detection of virally-induced abnormalities at both the viral level and that of the compromised human cell, would be of enormous clinical relevance if it could help in determining where along a molecular trajectory, from normal to abnormal tissue, a population of cells has reached. However, despite the use of the Pap smear for half a century, a solid early risk assessment between abnormal cervical cytological diagnoses and normalcy is currently still problematical. Major problems revolve around the elusive criteria on which to define ‘precancer’, such as the various grades of Cervical Intraepithelial Neoplasia, (CIN1, CIN2 and CIN3) and hence on the clinical decisions that relate to treatment options. Precancer definitions are considered by some clinicians to be a pseudo-precise way in which to avoid using CIN2, CIN3 and carcinoma in situ. There is great heterogeneity in microscopic diagnoses and even in the clinical meaning of CIN2, (2003, Schiffman, M., J. Nat. Cancer Instit. Monog. 31, 14-19). Some CIN2 lesions have a bad microscopic appearance but will nevertheless be overcome by the immune system and disappear, whereas other lesions will progress to invasive carcinoma. Thus CIN2 is considered by some as a buffer zone of equivocal diagnosis although the boundary conditions of such a zone remain controversial. Some clinicians consider it to be poor practice to combine CIN2 and CIN3, whereas others will treat all lesions of CIN2 or worse. Finally, the literature indicates that between a third and two thirds of CIN3 assigned women will develop invasive carcinoma, but even this occurs in an unpredictable time-dependent fashion, (2003, Schiffman, M., J. Nat. Cancer. Instit. Monog. 31, 14-19; 1978, Kinlen, L. J., et al., Lancet 2, 463-465; 1956, Peterson, O. Am. J. Obstet. Gynec. 72, 1063-1071).

[0005] The central problem still confronting physicians today is that defining low grade cytological abnormalities such as atypical squamous cells of undetermined significance, (ASCUS), or squamous intraepithelial lesions (SILs) is difficult. ‘In fact, ASCUS is not a proper diagnosis but rather is a “wastebasket” category of poorly understood changes’, (1996, Lorincz, A. T., 1996, J. Obstet. Gyncol. Res. 22, 629-636). The whole spectrum of precancerous lesions is difficult to interpret owing to cofactor effects from oral contraceptive use, smoking, pathogens other than HPV such as Chlamydia trachomatis and Herpes Simplex Virus type 2, antioxidant nutrients and cervical inflammation, all of which are claimed to modulate the risk of progression from high grade squamous intraepithelial lesions (HSILs) to cervical cancer (2003, Castellsague, X. J. Nat. Cancer Inst. Monog. 31, 20-28). The introduction of the Bethesda system of classification and its revision in 2001 has done little to reduce the confusion among clinicians, since it was initially found unhelpful to include koilocytotic atypia with CIN1 into the newer category of low-grade squamous intraepithelial lesions, (LSILs). The result of the introduction of the Bethesda system was that many clinicians would not carry out colposcopy on koilocytotic atypia, ‘but felt compelled do so on patients with CIN1’, (1995, Hatch, K. D., Am. J. Obstet. Gyn. 172, 1150-1157). It was clear that although colposcopic expertise required many years of training, subjective cytological criteria still lead to inconsistencies and non-reproducibilities, (1994, Sherman, M. E., Am. J. Clin. Pathology, 102, 182-187; 1988, Giles, J. A., Br. Med. J., 296, 1099-1102).

[0006] The continuing diagnostic hurdle is that vague diagnoses such as ‘atypia’ can account for 20% or more of diagnoses in some settings, (1993, Schiffman, M. Contemporary OB/GYN, 27-40). This is illustrated by a test designed specifically to evaluate the level of independent diagnostic agreement of pathologists on smears that were ‘atypical’. It was found that exact agreement between five professional pathologists on an identical set of samples occurred in only 29% of cases, (1994, Sherman, M. E., et al., Am. J. Clin. Pathology, 102, 182-187). The net result is that cervical cytology continues to have high false negative rates (termed low sensitivity) and high false positive rates, (termed low specificity). The cytological interpretations of various pathologists yield a false negative rate of up to 20% or so and a false positive rate of up to 15% (1993, Koss, L. G., Cancer, 71, 1406-1412). False positive results lead to unnecessary colposcopic examinations, biopsies and treatments, all of which add to the health care cost burden. False negative results lead to potential malpractice law suits with their associated costs. It was into this arena that molecular diagnoses of early stages of cervical abnormalities using tests for HPV offer a less subjective test than cytological ones.

### Limitations of Assays for HPV Detection.

[0007] The presence of HPV DNA was originally assayed by low stringency Southern Blot technology applied to DNA from samples from exophytic condylomata acuminata, (1975, Southern, E. M., J. Mol. Biol. 98, 503-527; 1993, Brown, D. R., et al., J. Clinical Microbiology, 31, 2667-2673). However, in a clinical setting, the technique was found to be ‘tedious, time consuming and requires fresh tissue samples’ and there was extensive between-laboratory variation. The technology was deemed ‘unsuitable for clinical use’ (1995, Ferenozy, A, Int. J. Gynecol. Cancer, 5, 321-328).

[0008] The introduction of a modification of the Southern Blot, namely the Dot Blot, was US Food and Drug Administration (FDA) approved and marketed as Virapap™ and Viratype™ (Life Technologies Inc, Gaithersburg, Md.). The detection limits were 3 picograms of HPV DNA per millilitre of sample, which is approximately 375,000 viral genomes per ml. However, the sensitivity of the Virapap™ kit turned out to be less than that of cytological methods, (1991, Bauer, H. M., JAMA, 265, 472-477). In addition such kits used radioactive nucleic acids for detection, were labour intensive, expensive in a clinical setting, and there was widespread confusion about their clinical applicability. Finally, the molecular hybridization conditions for Viratype™ gave cross hybridization between different HPV types. Hence precisely determining which HPV types were present in a sample meant that the Viratype™ test had to be run a second time at higher stringencies of hybridization than those stipulated by the manufacturer.

[0009] At the in situ cytological level, matters were little better. Much of the early data on HPV detection using Fluorescent In Situ Hybridization (FISH) were erroneous and there was misclassification of HPV types; (1996, Schiffman, M.; in Richart, Contemporary OB/GYN, July 1996, pp 80). Currently, hybridization to paraffin-embedded sections using Omniprobe™ (Digene Diagnostics Inc, Silver Spring, Md.) to detect HPV sequences yields a sensitivity that is claimed to be 20 to 50 viruses per cell, and the Enzo PathoGene HPV In Situ Typing Assay (Enzo Life Sciences 60 Executive Boulevard, Farmingdale, N.Y.) is in use for determining the presence of HPV DNA beginning with formalin fixed, paraffin embedded tissue sections.

[0010] In situ hybridization tests are exacting, labour intensive and time consuming. Even with the most advanced Fluorescent In Situ Hybridization technology (FISH), it is currently not possible to routinely assay for a single full length viral genome, or a small segment of a viral genome that may be integrated into a single chromosomal site in the human genome. Routine FISH is best achieved using probes which are the size of Bacterial Artificial Chromosomes (of the order of 100 kilobases). These are over ten times the size of the full HPV genome and 100 times the size of an HPV gene such as E6 or E7.

[0011] Immunohistochemistry, using an antibody directed against an epitope of the L1 capsid protein of all relevant HPV types is another detection method (2004, Griesser, H., et al., Analyt. Quant. Cytol. Histol. 26, 241-245), but again it is labour intensive and time consuming.

[0012] The first generation HPV Hybrid Capture kit developed by Digene Diagnostics utilized non radioactive RNA probes to detect lesional HPV DNA and its non-radioactive nature made for easier and more economical use. Hybrid Capture used signal amplification rather than amplification of the target DNA to obtain sensitivity. However, as pointed out by Richart (Contemporary OB/GYN, July 1996), Hybrid Capture was prone to false positive results, owing to cross hybridization between novel HPV types and other HPV probes, and particularly when chemiluminescent values suddenly spiked. In addition, first generation Hybrid Capture detected only one third to one half of the infections detected by PCR. Hybrid Capture has since been upgraded, so that the Hybrid Capture 2™ (Digene Corporation, Gaithersburg, Md.) test now contains a mixture of thirteen HPV probes for types, 16, 18, 31, 33, 35, 39, 45, 51, 52, 56, 58, 59 and 68 and the US FDA approved threshold has been set at 1 picogram of HPV DNA per ml of test solution, equivalent to 125,000 viral genomes per ml, (2001, Salomon, D., J. Nat. Cancer Instit. 93, 293-299). Hybrid Capture 3™ (Digene Corporation, Gaithersburg, Md.) utilizes an even more complex mixture of biotinylated capture oligonucleotides, and unlabelled ‘blocker’ oligonucleotides, that together are claimed to eliminate the issue of probe cross-reactivity seen with Hybrid Capture 2™. However, Hybrid Capture 2™, with its known problems of probe cross hybridization, is still the only FDA approved product, (2001, Lorincz, A. & Anthony, J. Papillomavirus Report, 12, 145-154).

[0013] Hybrid Capture has also been adapted to measuring the RNA expression that derives from the genes comprising the HPV genome (U.S. Pat. No. 6,355,424). Specifically, the ratio of E6 and/or E7 RNA levels relative to E2 and/or L1 RNA levels is assessed. This is done by hybridization of biotinylated DNA probes to viral RNA from cells lysed in a microtiter plate. The RNA:DNA hybrids are captured by antibody binding as in the previous embodiment of the Hybrid Capture technology and assayed as previously using a chemiluminescent reagent.

[0014] The most sensitive HPV detection methodology is polymerase chain reaction (PCR) which readily detects a single viral copy in a human genome. The first HPV PCR detection kit was the L1 consensus primer polymerase chain reaction method from Roche Molecular Systems with a practical lower detection limit of about 100 viral genomes. This test was evaluated by direct comparisons between Southern Blot and PCR technologies (1991, Schiffman, M. H., J. Clin. Microbiol, 29, 573-577) and was found to be very labour intensive, (see 1995, Schiffman, M. H., J. Clin. Microbiol, 33, 545-550).

[0015] Given all the problems and shortcomings outlined above, there is still controversy as regards the clinical impact of DNA methodologies in screening for preneoplastic lesions. Sensitive early molecular prognostic indicators of cellular abnormalities would be extremely valuable.

[0016] The present inventors have developed new methods, kits and integrated bioinformatic platforms for detecting HPV and differentiating between different types of HPV.

### DISCLOSURE OF INVENTION

[0017] In a first aspect, the present invention provides an assay for detecting human papilloma virus (HPV) comprising:

[0018] treating the viral nucleic acid with an agent that modifies cytosine to form derivative viral nucleic acid;

[0019] amplifying at least a part of the derivative viral nucleic acid to form an HPV-specific nucleic acid molecule; and

[0020] looking for the presence of an HPV-specific nucleic acid molecule, wherein detection of the HPV-specific nucleic acid molecule is indicative of HPV.

[0021] preferably, the assay further comprises:

[0022] providing HPV primers capable of allowing amplification of an HPV-specific nucleic acid molecule.

[0023] Preferably, the virus is in a sample. The sample can be any suitable clinical, clinical product or environmental sample. Typically, the sample will be swab, biopsy, smear, Pap smear, blood, plasma, serum, blood product, surface scrape, spatula, liquid suspension, frozen material, paraffin blocks, glass slides, forensic collection systems or archival material. Preferably, the sample is a smear, Pap smear or liquid suspension of cells.

[0024] Preferably, the agent modifies cytosine to form uracil in the derivative nucleic acid. Preferably, the agent is selected from bisulfite, acetate or citrate. More preferably, the agent is sodium bisulfite.

[0025] Preferably, the agent modifies an cytosine to a uracil in each strand of complementary double stranded viral nucleic acid forming two derivative but non-complementary viral nucleic acid molecules.

[0026] Preferably, the agent modifies cytosine to uracil which is then replaced as a thymine during amplification of the derivative nucleic acid. Preferably, the agent used for modifying cytosine is sodium bisulfite. Other agents that similarly modify cytosine, but not methylated cytosine can also be used in the method of the invention. Examples include, but not limited to bisulfite, acetate or citrate. Preferably, the agent is sodium bisulfite, a reagent, which in the presence of acidic aqueous conditions, modifies cytosine into uracil.

[0027] Sodium bisulfite (NaHSO₃) reacts readily with the 5,6-double bond of cytosine to form a sulfonated cytosine reaction intermediate which is susceptible to deamination, and in the presence of water gives rise to a uracil sulfite. If necessary, the sulfite group can be removed under mild alkaline conditions, resulting in the formation of uracil. Thus, potentially all cytosines will be converted to uracils. Any methylated cytosines, however, cannot be converted by the modifying reagent due to protection by methylation.

[0028] Preferably, the derivative viral nucleic acid has a reduced total number of cytosines compared with the corresponding untreated viral nucleic acid.

[0029] Preferably, the amplification is carried out by polymerase chain reaction (PCR), ligase chain reaction (LCR), isothermal amplification, signal amplification or combination of the above. More preferably, the amplification is carried out by PCR.

[0030] Usually, amplification forms an HPV-specific nucleic acid molecule that does not form part of a natural HPV genome.

[0031] In a preferred form, the HPV-specific nucleic acid molecule is specific for an HPV species, a type of HPV or sub-type of HPV. The HPV type can confer a high, medium or low level oncogenic status on a given tissue in a particular human ethnic lineage. High risk HPV types are HPV16, 18, 45 and 56, medium risk HPV types are HPV31, 33, 35, 39, 51, 52, 56, 58, 59 and 68, and low risk strains are HPV6, 11, 30, 42, 43, 44, 53, 54, and 55. Preferably, high-risk HPV16, 18, 45 or 56 and medium risk HPV 31, 33, 35, 39, 51, 52, 58, 59 and 68 are detected.

[0032] It will be appreciated that the HPV-specific nucleic acid is detected by any suitable means. Examples include, but not limited to, gel electrophoresis, hybridisation with labelled probes, use of tagged primers that allow subsequent identification, an enzyme linked assay, or use of fluorescently-tagged primers that give rise to a signal upon hybridisation with the target DNA.

[0033] In a second aspect, the present invention provides an HPV primer or probe comprising one or more of SEQ ID NO: 1 to SEQ ID NO: 516.

[0034] Preferably, the HPV primer or probe for detecting high-medium risk HPV strains includes one or more of SEQ ID NO: 333 to SEQ ID NO: 350.

[0035] Preferably, the HPV primer or probe for detecting HPV includes SEQ ID NO: 462, SEQ ID NO: 479, SEQ ID NO: 463, SEQ ID NO: 478, SEQ ID NO: 470, SEQ ID NO: 485, or SEQ ID NO: 486.

[0036] In a third aspect, the present invention provides a kit for the detection of HPV comprising two or more HPV primers or probes according to the second aspect of the present invention together with suitable reagent or diluent.

[0037] In a fourth aspect, the present invention provides a derivative HPV nucleic acid.

[0038] Preferably, the derivative HPV nucleic acid is from high-risk HPV16, 18, 45 or 56 and medium risk HPV 31, 33, 35, 39, 51, 52, 58, 59 and 68.

[0039] More preferably, the derivative HPV nucleic acid comprises any one or more of SEQ ID NO: 614, SEQ ID NO: 617, SEQ ID NO: 620, SEQ ID NO: 623, SEQ ID NO: 626, SEQ ID NO: 629, SEQ ID NO: 632, SEQ ID NO: 635, SEQ ID NO: 638, SEQ ID NO: 641, SEQ ID NO: 644, SEQ ID NO: 647, SEQ ID NO: 650, SEQ ID NO: 653, SEQ ID NO: 656, SEQ ID NO: 659, SEQ ID NO: 662, SEQ ID NO: 665, SEQ ID NO: 668, SEQ. ID NO: 671, SEQ ID NO: 674, SEQ ID NO: 677, SEQ ID NO: 680, SEQ ID NO: 683, SEQ ID NO: 686, or SEQ ID NO: 689, parts thereof comprising at least 15 nucleotides, and nucleic acid molecules capable of hybridizing under stringent conditions to SEQ ID NO: 614, SEQ ID NO: 617, SEQ ID NO: 620, SEQ ID NO: 623, SEQ ID NO: 626, SEQ ID NO: 629, SEQ ID NO: 632, SEQ ID NO: 635, SEQ ID NO: 638, SEQ ID NO: 641, SEQ ID NO: 644, SEQ ID NO: 647, SEQ ID NO: 650, SEQ ID NO: 653, SEQ ID NO: 656, SEQ ID NO: 659, SEQ ID NO: 662, SEQ ID NO: 665, SEQ ID NO: 668, SEQ ID NO: 671, SEQ ID NO: 674, SEQ ID NO: 677, SEQ ID NO: 680, SEQ ID NO: 683, SEQ ID NO: 686, or SEQ ID NO: 689.

[0040] The parts of the derivative HPV nucleic acid can be at least 15, 16, 17, 18, 19, 20, 21, 22, 23, 24, 25, 26, 27, 28, 29, 30 etc or more nucleotides.

[0041] In a fifth aspect, the present invention provides a simplified HPV nucleic acid.

[0042] Preferably, the simplified HPV nucleic acid is from high-risk HPV16, 18, 45 or 56 and medium risk HPV 31, 33, 35, 39, 51, 52, 58, 59 and 68.

[0043] More preferably, the simplified HPV nucleic acid comprises any one or more of SEQ ID NO: 615, SEQ ID NO: 618, SEQ ID NO: 621, SEQ ID NO: 624, SEQ ID NO: 627, SEQ ID NO: 630, SEQ ID NO: 633, SEQ ID NO: 636, SEQ ID NO: 639, SEQ ID NO: 642, SEQ ID NO: 645, SEQ ID NO: 648, SEQ ID NO: 651, SEQ ID NO: 654, SEQ ID NO: 657, SEQ ID NO: 660, SEQ ID NO: 663, SEQ ID NO: 666, SEQ ID NO: 669, SEQ ID NO: 672, SEQ ID NO: 675, SEQ ID NO: 678, SEQ ID NO: 681, SEQ ID NO: 684, SEQ ID NO: 687, or SEQ ID NO: 690; parts thereof comprising at least 15 nucleotides, and nucleic acid molecules capable of hybridizing under stringent conditions to SEQ ID NO: 615, SEQ ID NO: 618, SEQ ID NO: 621, SEQ ID NO: 624, SEQ ID NO: 627, SEQ ID NO: 630, SEQ ID NO: 633, SEQ ID NO: 636, SEQ ID NO: 639, SEQ ID NO: 642, SEQ ID NO: 645, SEQ ID NO: 648, SEQ ID NO: 651, SEQ ID NO: 654, SEQ ID NO: 657, SEQ ID NO: 660, SEQ ID NO: 663, SEQ ID NO: 666, SEQ ID NO: 669, SEQ ID NO: 672, SEQ ID NO: 675, SEQ ID NO: 678, SEQ ID NO: 681, SEQ ID NO: 684, SEQ ID NO: 687, or SEQ ID NO: 690.

[0044] The parts of the simplified HPV nucleic acid can be at least 15, 16, 17, 18, 19, 20, 21, 22, 23, 24, 25, 26, 27, 28, 29, 30 etc nucleotides.

[0045] In a sixth aspect, the present invention provides use of the derivative or simplified HPV nucleic acid according to the fourth or fifth aspects of the present invention to obtain probes or primers for HPV detection.

[0046] In a seventh aspect, the present invention provides an assay for detecting the presence of HPV in a sample comprising:

[0047] obtaining viral nucleic acid from a sample;

[0048] treating the viral nucleic acid with bisulphite under conditions that cause cytosines in the viral nucleic acid to be converted to uracil to form derivative viral nucleic acid;

[0049] providing primers capable of binding to regions of derivative viral nucleic acid, the primers being capable of allowing amplification of a desired HPV-specific nucleic acid molecule to the derivative viral nucleic acid;

[0050] carrying out an amplification reaction on the derivative viral nucleic acid; and

[0051] looking for the presence of a desired amplified nucleic acid product, wherein detection of the amplified product is indicative of the presence of HPV in the sample.

[0052] In one preferred form, the assay further comprises:

[0053] treating a sample having HPV present with an additional test which can determine the type, subtype, variant or genotype of HPV in the sample.

[0054] The additional test is preferably an amplification reaction using primers specific for a given HPV type or group of types, wherein the presence of an amplified product is indicative of the HPV type or group of types.

[0055] In an eighth aspect, the present invention provides a method for producing an HPV-specific nucleic acid comprising:

[0056] treating a sample containing HPV nucleic acid with an agent that modifies cytosine to form derivative HPV nucleic acid; and

[0057] amplifying at least part of the derivative HPV nucleic acid to form a simplified HPV nucleic acid having a reduced total number of cytosines compared with the corresponding untreated HPV nucleic acid, wherein the simplified nucleic acid molecule includes a nucleic acid sequence specific for HPV.

[0058] For double stranded DNA which contains no methylated cytosines, the treating step results in two derivative nucleic acids, each containing the bases adenine, guanine, thymine and uracil. The two derivative nucleic acids are produced from the two single strands of the double stranded DNA. The two derivative nucleic acids have substantially no cytosines but still have the same total number of bases and sequence length as the original untreated DNA molecule. Importantly, the two derivatives are not complimentary to each other and form a top and a bottom strand. One or more of the strands can be used as the target for amplification to produce the simplified nucleic acid molecule.

[0059] Typically, the simplified nucleic acid sequence specific for HPV does not occur naturally in an untreated HPV genome.

[0060] In a preferred form, the method further comprises:

[0061] detecting the HPV-specific nucleic acid having a nucleic acid sequence indicative of a particular HPV type.

[0062] The HPV-specific nucleic acid can be detected by any suitable means. Examples include, but not limited to, gel electrophoresis, hybridisation with labelled probes, use of tagged primers that allow subsequent identification (eg by an enzyme linked assay), and use of fluorescently-tagged primers that give rise to a signal upon hybridisation with the target DNA (eg Beacon and TaqMan systems).

[0063] Preferably, the HPV-specific nucleic acid molecule is detected by:

[0064] providing a detector ligand capable of binding to a target region of the nucleic acid molecule and allowing sufficient time for the detector ligand to bind to the target region; and

[0065] measuring binding of the detector ligand to the nucleic acid molecule to detect the presence of the target nucleic acid molecule. It will be appreciated that the nucleic acid molecule can be detected by any suitable means known to the art.

[0066] In a ninth aspect, the present invention provides a method for obtaining an HPV-specific nucleic acid molecule comprising:

[0067] treating HPV nucleic acid from representative types of HPV with an agent that modifies cytosine to form a derivative HPV nucleic acid molecule for each type;

[0068] amplifying at least part of the derivative HPV nucleic acid molecule from each type to form simplified nucleic acid molecules having a reduced total number of cytosines compared with the corresponding untreated HPV nucleic acid molecules; and

[0069] obtaining an HPV-specific nucleic acid molecule for a type or types by identifying common or unique sequence or sequences in the simplified nucleic acid molecules.

[0070] It will be appreciated that the method can be carried out bioinformatically (in silico) from known nucleic acid sequences of HPV types where each cytosine in the original sequences is changed to thymine to obtain the simplified HPV nucleic acid molecules directly. Sequence identity can be determined from the simplified nucleic acid sequences.

[0071] For example, treating step can be carried out bioinformatically by replacing all cytosines in the representative HPV genomes with uracil to form derivative HPV nucleic acid molecules for each type. Each derivative HPV nucleic acid molecule will have the same total number of bases as the corresponding untreated HPV genome. It will be appreciated that each uracil in the derivative HPV nucleic acid molecule will be copied to a thymine during the amplification process. Accordingly, the amplified sequences forming the simplified nucleic acid molecules will not correspond to sequences in the original HPV genome. Each strand (‘top’ and ‘bottom’) of the derivative nucleic acid will not be complimentary so therefore they form two possible templates for amplification.

[0072] When an HPV-specific nucleic acid molecule has been obtained for any given HPV type by this method, probes or primers can be designed to ensure amplification of the region of interest in PCR or other suitable amplification reaction. It is important to note that both strands of a treated and thus converted genome, (hereafter termed “derivative’) can be analyzed for primer design, since treatment or conversion leads to asymmetries of sequence, (see below), and hence different primer sequences are required for the detection of the ‘top’ and ‘bottom’ strands of the same locus. Thus, there are two populations of molecules, the converted genome as it exists immediately after conversion, and the population of molecules that results after the derivative is replicated by conventional enzymological means (PCR). Primers are typically designed for the converted top strand for convenience but primers can also be generated for the bottom strand. Thus, it will be possible to carry out clinical or scientific assays on samples to detect a given type of HPV.

[0073] The present invention also allows the generation of probes or primers that are indicative of all representative types of HPV which can be used to determine whether any HPV genome is present in a given sample. Further HPV type-specific probes can be used to actually detect or identify a given, type, subtype, variant and genotype examples of HPV.

[0074] Throughout this specification, unless the context requires otherwise, the word “comprise”, or variations such as “comprises” or “comprising”, will be understood to imply the inclusion of a stated element, integer or step, or group of elements, integers or steps, but not the exclusion of any other element, integer or step, or group of elements, integers or steps.

[0075] Any discussion of documents, acts, materials, devices, articles or the like which has been included in the present specification is solely for the purpose of providing a context for the present invention. It is not to be taken as an admission that any or all of these matters form part of the prior art base or were common general knowledge in the field relevant to the present invention as it existed in Australia prior to development of the present invention.

[0076] In order that the present invention may be more clearly understood, preferred embodiments will be described with reference to the following drawings and examples.

### BRIEF DESCRIPTION OF THE DRAWINGS

[0077] FIG. 1 shows DNA alignment of the ‘top’ strand of the same 8 base pair genomic region of individual viral types, HPV 33, 35, 39, 52, 58, 16, 18, 45 and 56, before bisulphite treatment and the corresponding sequence of the derivative after bisulphite conversion. The cytosines have been converted to uracils and the uracils are represented as thymines. Nucleotide positions that vary between the types are shown as bold. (SEQ ID NO is listed after each sequence).

[0078] FIG. 2 shows DNA alignment of the ‘top’ strand of a 17 base pair genomic region of individual viral types HPV 6, 11, 43, 44, 53, 55, 30, 31, 39, 51, 52, 16, 18 and 45, and the ‘complexity-reduction’ following bisulphite treatment of the DNA sample that gives rise to the derivative sequence. The consensus primers for the derivatives of the ‘top’ and ‘bottom’ strands will differ after bisulphite treatment; only primers for one strand are illustrated. The cytosines have been converted to uracils and the uracils are represented as thymines. Nucleotide positions that vary between the HPV types are shown as bold. (SEQ ID NO: is listed after each sequence).

[0079] FIG. 3 shows DNA alignment of the ‘top’ strand of a 20 base pair region of individual viral types (HPV 6, 43, 44, 54, 55, 30, 33, 58, 18 and 45) and identification of regions of >90% sequence similarity in the derivative sequences using the HGS complexity-reduction method. The consensus primers for the ‘top’ and ‘bottom’ strands will differ after bisulphite treatment; only primers for one strand are illustrated. The cytosines have been converted to uracils and the uracils are represented as thymines. Nucleotide positions that vary between the HPV types are shown as bold. (SEQ ID NO: is listed after each sequence).

[0080] FIG. 4 shows DNA alignment of the ‘top’ strand of a 20 base pair region of individual viral types (HPV 6, 43, 44, 54, 55, 30, 33, 58, 18 and 45) and the sequence of shorter high affinity INA primers or probes that can be used more effectively in hybridization reactions than standard oligonucleotides. The consensus primers for the ‘top’ and ‘bottom’ strands will differ after bisulphite treatment; only primers for one strand are illustrated. The cytosines have been converted to uracils and the uracils are represented as thymines. (SEQ ID NO: is listed after each sequence).

[0081] FIG. 5 shows the results of a PCR amplification using universal HGS complexity-reduced primers for the ‘top’ strand of the L1 region of bisulphite-treated HPV DNA extracted from liquid-based cytology (LBC) specimens from sixteen patients #s 1 to 16.

[0082] FIG. 6 shows multiplex PCR amplification using HGS complexity-reduced primers for the ‘top’ strand of the E7 region of the high-risk bisulphite-treated complexity-reduced derivative from HPV16, 18, 45 and 56. The DNA was extracted from liquid-based cytology specimens from the same patients #s 1 to 16. The arrow indicates the expected size of the amplified nucleic acid products.

[0083] FIG. 7 shows a PCR amplification using HGS complexity-reduced primers for the ‘top’ strand of the E7 region of the high risk bisulphite-treated complexity-reduced derivative from HPV16. The DNA was extracted from liquid based cytology specimens from the same patient samples #s 1 to 16.

[0084] FIG. 8 shows a PCR amplification using HGS complexity-reduced primers for the ‘top’ strand of the E7 region of the high risk bisulphite-treated complexity-reduced derivative from HPV18: The DNA was extracted from liquid based cytology specimens from the same patient samples #s 1 to 16.

[0085] FIG. 9 shows a PCR amplification using HGS complexity-reduced primers for the ‘top’ strand of the E4, E6 and E7 regions of the high risk bisulphite-treated complexity-reduced derivative from HPV16. The DNA was extracted from liquid based cytology specimens from the same patient samples #s 1 to 16. The arrows indicate the expected size of the amplified nucleic acid products.

[0086] FIG. 10 shows a PCR amplification using HGS complexity-reduced primers for the ‘top’ strand of the E4, E6 and E7 regions of the high risk bisulphite-treated complexity-reduced derivative from HPV18. The DNA was extracted from liquid based cytology specimens from the same patient samples #s 1 to 16. The arrows indicate the expected size of the amplified nucleic acid products.

[0087] FIG. 11 summarizes the three different derivative regions, (E4, E6 and E7) that have been PCR amplifiable from HPV derivatives of various risk types, using complexity-reduced primers for the ‘top’ strand on samples from normal or abnormal cervical tissues from liquid-based cytology samples from patients #s A to T. The results of 580 PCR tests generated from Liquid Based Cytology samples from 20 patients [denoted #s A-T] and examined for size by gel electrophoresis, and in some cases by direct sequence analysis to verify the identity of the product. Primers were made to determine the presence [denoted positive, and shaded], or absence [negative] of regions of the E4, E6 and E7 regions of various HPV types. A universal nested primer set to a part of the L1 region of all HPV types, irrespective of risk status, [denoted Uni], is shown for column 2. For the purposes of this figure high risk HPV strains are defined as HPV 16, 18, 45 and 56, medium risk strains as HPV 30, 31, 33, 35, 39, 51, 52, 56, 58, 59 and 66, while low risk strains are defined as HPV6, 11, 42, 43, 44, 53, 54, and 55. A multiplex nested primer set to a part of the E7 region of all high-risk HPV types [denoted High] is shown for column 3. A multiplex nested primer set to a part of the E7 region of all medium-risk HPV types [denoted Medium] is shown for column 4. A multiplex nested primer set to a part of the E7 region of all low-risk HPV types [denoted Low] is shown for column 5. The presence of a band on a gel is indicative of the designated viral fragment in the clinical sample.

[0088] FIG. 12 illustrates the effects of primer degeneracy on the probability of obtaining a PCR product on bisulphite-treated samples from patients #s 21 to 42. Primers were made to the ‘top’ strand only. The effect of the degeneracy level of a single member of a 23-mer primer pair on the efficiency of PCR amplification reactions. In PCR reaction HPV-HM, the number of possible primer combinations for primer #1 is 72. In PCR reaction HPV-HML, the number of possible primer combinations for primer #1 is greatly increased to 2304. Amplified nucleic acid products are visible in PCR reaction HPV-HM but not in PCR reaction HPV-HML. The symbols G, A, T and C denote the form normal bases, while D, K, W, and H are the standard symbols for mixtures of different bases at that position. (D=A, G or T; K=G or T; W=A or T; H=A, T or C). (SEQ ID NO: is listed after each sequence).

[0089] FIG. 13 shows the top strand of the HPV16 viral nucleic acid molecule in its three possible sequences; A. the normal viral sequence (SEQ ID NO: 613); B. the derivative sequence with uracils replacing cytosines (SEQ ID NO: 614); and C. the genomically simplified sequence where uracils have been replaced by thymines (SEQ ID NO: 615).

[0090] FIG. 14 shows the bottom strand of the HPV16 viral nucleic acid molecule in its three possible sequences; A. the normal viral sequence (SEQ ID NO: 616), B. the derivative sequence with uracils replacing cytosines (SEQ ID NO: 617); and C. the genomically simplified sequence where uracils have been replaced by thymines (SEQ ID NO: 618).

[0091] FIG. 15 is a schematic of the genomic landscape of the top strand of HPV 16 from nucleotide position #1 to nucleotide position #7904 with the boxes indicating the positions of various nested primer sets used for amplification purposes. The positions of primer sets for primers that are useful for amplifying DNA from a combinations of HPV types, such as high and medium risk, (HM) and high, medium and low risk, (HML); high, (H) and high and medium, (HM) combinations are as indicated.

[0092] FIG. 16 is a schematic of the genomic landscape of the bottom strand of HPV 16 from nucleotide position #1 to nucleotide position #7904 with the boxes indicating the positions of various nested primer sets used for amplification purposes. The positions of primer sets for primers that are useful for amplifying DNA from a combinations of HPV types, such as high and medium risk, (HM) and high, medium and low risk, (HML); high, (H) and high and medium, (HM) combinations are as indicated.

[0093] FIG. 17 shows a tissue section from an individual with cervical carcinoma. Arrow 1 reveals a darkened area of cancerous cells with large nuclei. Arrow 2 shows normal connective tissue.

[0094] FIG. 18 shows the results of a PCR amplification using the high-medium risk HGS complexity-reduced primers (for the detection of thirteen HPV types, namely HPV 16, 18, 31, 33, 35, 39, 45, 51, 52, 56, 58, 59 and 68) for the ‘top’ strand of the E7 region of bisulphite-treated HPV DNA extracted from liquid-based cytology (LBC) specimens from twelve patient samples in which cytological analyses had been completed, (denoted #s 1 to 12).

[0095] FIG. 19 shows the results of a PCR amplification using material from clinical samples #2, #4, #7 and #11 from the patients that were positive for a high-medium risk HPV in FIG. 18 and a determination of exactly which of the HPV types (HPV 16, 18, 31, 33, 35, 39, 45, 51, 52, 56, 58, 59 and 68), was responsible for each of the amplicons visible in FIG. 18.

[0096] FIG. 20 shows the results of PCR amplification from archival paraffin sections from material from 16 patients with High grade Squamous Intraepithelial Lesions (HSILs), using high-medium risk primer sets (HPV 16, 18, 31, 33, 35, 39, 45, 51, 52, 56, 58, 59 and 68), made to the genomically simplified top strand of HPV.

[0097] FIG. 21 A shows the results of PCR amplification from Liquid Based Cytology samples using primers made to the bottom strand of bisulphite converted, genomically simplified DNA. The primers target HPV types (High-medium risk types HPV 16, 18, 31, 33, 35, 39, 45, 51, 52, 56, 58, 59, 68 and low risk types HPV 6, 11, 42, 43, 44, 53, 54 and 55).

[0098] FIG. 21 B shows the results of PCR amplification from Liquid Based Cytology samples using primers made to the top strand of bisulphite converted, genomically simplified DNA. The primers target the thirteen high-medium risk HPV types, (HPV 16, 18, 31, 33, 35, 39, 45, 51, 52, 56, 58, 59 and 68).

[0099] FIG. 22 shows results of DNA sequencing of an HPV amplicon genotyped as HPV 16 from portion of an automated gel read. The peaks correspond to the DNA bases as indicated.

[0100] FIG. 23 shows the top strand of the HPV18 viral nucleic acid molecule in its three possible sequences; A. the normal viral sequence (SEQ ID NO: 619); B. the derivative sequence with uracils replacing cytosines (SEQ ID NO: 620); and C. the genomically simplified sequence where uracils have been replaced by thymines (SEQ ID NO: 621).

[0101] FIG. 24 shows the bottom strand of the HPV18 viral nucleic acid molecule in its three possible sequences; A. the normal viral sequence (SEQ ID NO: 622), B. the derivative sequence with uracils replacing cytosines (SEQ ID NO: 623); and C. the genomically simplified sequence where uracils have been replaced by thymines (SEQ ID NO: 624).

[0102] FIG. 25 shows the top strand of the HPV31 viral nucleic acid molecule in its three possible sequences; A. the normal viral sequence (SEQ ID NO: 625); B. the derivative sequence with uracils replacing cytosines (SEQ ID NO: 626); and C. the genomically simplified sequence where uracils have been replaced by thymines (SEQ ID NO: 627).

[0103] FIG. 26 shows the bottom strand of the HPV31 viral nucleic acid molecule in its three possible sequences; A. the normal viral sequence (SEQ ID NO: 628), B. the derivative sequence with uracils replacing cytosines (SEQ ID NO: 629); and C. the genomically simplified sequence where uracils have been replaced by thymines (SEQ ID NO: 630).

[0104] FIG. 27 shows the top strand of the HPV33 viral nucleic acid molecule in its three possible sequences; A. the normal viral sequence (SEQ ID NO: 631); B. the derivative sequence with uracils replacing cytosines (SEQ ID NO: 632); and C. the genomically simplified sequence where uracils have been replaced by thymines (SEQ ID NO: 633).

[0105] FIG. 28 shows the bottom strand of the HPV33 viral nucleic acid molecule in its three possible sequences; A. the normal viral sequence (SEQ ID NO: 634), B. the derivative sequence with uracils replacing cytosines (SEQ ID NO: 635); and C. the genomically simplified sequence where uracils have been replaced by thymines (SEQ ID NO: 636).

[0106] FIG. 29 shows the top strand of the HPV35 viral nucleic acid molecule in its three possible sequences; A. the normal viral sequence (SEQ ID NO: 637); B. the derivative sequence with uracils replacing cytosines (SEQ ID NO: 638); and C. the genomically simplified sequence where uracils have been replaced by thymines (SEQ ID NO: 639).

[0107] FIG. 30 shows the bottom strand of the HPV35 viral nucleic acid molecule in its three possible sequences; A. the normal viral sequence (SEQ ID NO: 640), B. the derivative sequence with uracils replacing cytosines (SEQ ID NO: 641); and C. the genomically simplified sequence where uracils have been replaced by thymines (SEQ ID NO: 642).

[0108] FIG. 31 shows the top strand of the HPV39 viral nucleic acid molecule in its three possible sequences; A. the normal viral sequence (SEQ ID NO: 643); B. the derivative sequence with uracils replacing cytosines (SEQ ID NO: 644); and C. the genomically simplified sequence where uracils have been replaced by thymines (SEQ ID NO: 645).

[0109] FIG. 32 shows the bottom strand of the HPV39 viral nucleic acid molecule in its three possible sequences; A. the normal viral sequence (SEQ ID NO: 646), B. the derivative sequence with uracils replacing cytosines (SEQ ID NO: 647); and C. the genomically simplified sequence where uracils have been replaced by thymines (SEQ ID NO: 648).

[0110] FIG. 33 shows the top strand of the HPV45 viral nucleic acid molecule in its three possible sequences; A. the normal viral sequence (SEQ ID NO: 649); B. the derivative sequence with uracils replacing cytosines (SEQ ID NO: 650); and C. the genomically simplified sequence where uracils have been replaced by thymines (SEQ ID NO: 651).

[0111] FIG. 34 shows the bottom strand of the HPV45 viral nucleic acid molecule in its three possible sequences; A. the normal viral sequence (SEQ ID NO: 652), B. the derivative sequence with uracils replacing cytosines (SEQ ID NO: 653); and C. the genomically simplified sequence where uracils have been replaced by thymines (SEQ ID NO: 654).

[0112] FIG. 35 shows the top strand of the HPV51 viral nucleic acid molecule in its three possible sequences; A. the normal viral sequence (SEQ ID NO: 655); B. the derivative sequence with uracils replacing cytosines (SEQ ID NO: 656); and C. the genomically simplified sequence where uracils have been replaced by thymines (SEQ ID NO: 657).

[0113] FIG. 36 shows the bottom strand of the HPV51 viral nucleic acid molecule in its three possible sequences; A. the normal viral sequence (SEQ ID NO: 658), B. the derivative sequence with uracils replacing cytosines (SEQ ID NO: 659); and C. the genomically simplified sequence where uracils have been replaced by thymines (SEQ ID NO: 660).

[0114] FIG. 37 shows the top strand of the HPV52 viral nucleic acid molecule in its three possible sequences; A. the normal viral sequence (SEQ ID NO: 661); B. the derivative sequence with uracils replacing cytosines (SEQ ID NO: 662); and C. the genomically simplified sequence where uracils have been replaced by thymines (SEQ ID NO: 663).

[0115] FIG. 38 shows the bottom strand of the HPV52 viral nucleic acid molecule in its three possible sequences; A. the normal viral sequence (SEQ ID NO: 664), B. the derivative sequence with uracils replacing cytosines (SEQ ID NO: 665); and C. the genomically simplified sequence where uracils have been replaced by thymines (SEQ ID NO: 666).

[0116] FIG. 39 shows the top strand of the HPV56 viral nucleic acid molecule in its three possible sequences; A. the normal viral sequence (SEQ ID NO: 667); B. the derivative sequence with uracils replacing cytosines (SEQ ID NO: 668); and C. the genomically simplified sequence where uracils have been replaced by thymines (SEQ ID NO: 669).

[0117] FIG. 40 shows the bottom strand of the HPV56 viral nucleic acid molecule in its three possible sequences; A. the normal viral sequence (SEQ ID NO: 670), B. the derivative sequence with uracils replacing cytosines (SEQ ID NO: 671); and C. the genomically simplified sequence where uracils have been replaced by thymines (SEQ ID NO: 672).

[0118] FIG. 41 shows the top strand of the HPV58 viral nucleic acid molecule in its three possible sequences; A. the normal viral sequence (SEQ ID NO: 673); B. the derivative sequence with uracils replacing cytosines (SEQ ID NO: 674); and C. the genomically simplified sequence where uracils have been replaced by thymines (SEQ ID NO: 675).

[0119] FIG. 42 shows the bottom strand of the HPV58 viral nucleic acid molecule in its three possible sequences; A. the normal viral sequence (SEQ ID NO: 676), B. the derivative sequence with uracils replacing cytosines (SEQ ID NO: 677); and C. the genomically simplified sequence where uracils have been replaced by thymines (SEQ ID NO: 678).

[0120] FIG. 43 shows the top strand of the HPV59 viral nucleic acid molecule in its three possible sequences; A. the normal viral sequence (SEQ ID NO: 679); B. the derivative sequence with uracils replacing cytosines (SEQ ID NO: 680); and C. the genomically simplified sequence where uracils have been replaced by thymines (SEQ ID NO: 681).

[0121] FIG. 44 shows the bottom strand of the HPV59 viral nucleic acid molecule in its three possible sequences; A. the normal viral sequence (SEQ ID NO: 682), B. the derivative sequence with uracils replacing cytosines (SEQ ID NO: 683); and C. the genomically simplified sequence where uracils have been replaced by thymines (SEQ ID NO: 684).

[0122] FIG. 45 shows the top strand of the HPV68a viral nucleic acid molecule in its three possible sequences; A. the normal viral sequence (SEQ ID NO: 685); B. the derivative sequence with uracils replacing cytosines (SEQ ID NO: 686); and C. the genomically simplified sequence where uracils have been replaced by thymines (SEQ ID NO: 687).

[0123] FIG. 46 shows the bottom strand of the HPV68a viral nucleic acid molecule in its three possible sequences; A. the normal viral sequence (SEQ ID NO: 688), B. the derivative sequence with uracils replacing cytosines (SEQ ID NO: 689); and C. the genomically simplified sequence where uracils have been replaced by thymines (SEQ ID NO: 690).

### MODE(S) FOR CARRYING OUT THE INVENTION

### Definitions

[0124] The term “genomic simplification” as used herein means the genomic (or other) nucleic acid is modified from being comprised of four bases adenine (A), guanine (G), thymine (T) and cytosine (C) to substantially containing the bases adenine (A), guanine (G), thymine (T) but still having substantially the same total number of bases.

[0125] The term “derivative nucleic acid” as used herein means a nucleic acid that substantially contains the bases A, G, T and U (or some other non-A, G or T base or base-like entity) and has substantially the same total number of bases as the corresponding unmodified nucleic acid. Substantially all cytosines in the untreated nucleic acid will have been converted to uracil (or some other non-A, G or T base or base-like entity) during treatment with the agent. It will be appreciated that altered cytosines, such as by methylation, may not necessarily be converted to uracil (or some other non-A, G or T base or base-like entity). Preferably, cytosine is modified to uracil.

[0126] The term “derivative HPV nucleic acid” as used herein means an HPV nucleic acid that substantially contains the bases A, G, T and U (or some other non-A, G or T base or base-like entity) and has substantially the same total number of bases as the corresponding unmodified HPV nucleic acid. Substantially all cytosines in the HPV DNA will have been converted to uracil (or some other non-A, G or T base or base-like entity) during treatment with the agent. It will be appreciated that altered cytosines, such as by methylation, may not necessarily be converted to uracil (or some other non-A, G or T base or base-like entity). As HPV nucleic acid typically does not contain methylated cytosine (or other cytosine alterations) the treated step preferably converts all cytosines. Preferably, cytosine is modified to uracil.

[0127] The term “converted genome” as used herein means an HPV genome that substantially contains the bases A, G, T and U (or some other non-A, G or T base or base-like entity) and has substantially the same total number of bases as the corresponding unconverted HPV genome. Substantially all cytosines in the HPV genome will have been converted to uracil (or some other non-A, G or T base or base-like entity).

[0128] The term “simplified nucleic acid” as used herein means the resulting nucleic acid product obtained after amplifying derivative nucleic acid. Uracil in the derivative nucleic acid is then replaced as a thymine (T) during amplification of the derivative nucleic acid to form the simplified nucleic acid molecule. The resulting product has substantially the same number of total bases as the corresponding unmodified nucleic acid but is substantially made up of a combination of three bases (A, G and T).

[0129] The term “simplified HPV nucleic acid” as used herein means the resulting HPV nucleic acid product obtained after amplifying derivative HPV nucleic acid. Uracil in the derivative nucleic acid is then replaced as a thymine (T) during amplification of the derivative nucleic acid to form the simplified HPV nucleic acid molecule. The resulting product has substantially the same number of total bases as the corresponding unmodified HPV nucleic acid but is substantially made up of a combination of three bases (A, G and T).

[0130] The term “simplified sequence” as used herein means the resulting nucleic acid sequence obtained after amplifying derivative nucleic acid to form a simplified nucleic acid. The resulting simplified sequence has substantially the same number of total bases as the corresponding unmodified nucleic acid sequence but is substantially made up of a combination of three bases (A, G and T).

[0131] The term “simplified HPV sequence” as used herein means the resulting nucleic acid sequence obtained after amplifying derivative HPV nucleic acid to form a simplified HPV nucleic acid. The resulting simplified sequence has substantially the same number of total bases as the corresponding unmodified HPV nucleic acid sequence but is substantially made up of a combination of three bases (A, G and T).

[0132] The term “non-converted sequence” as used herein means the nucleic acid sequence prior to treatment and amplification. A non-converted sequence typically is the sequence of the naturally occurring nucleic acid.

[0133] The term “non-converted HPV sequence” as used herein means the HPV nucleic acid sequence prior to treatment and amplification. A non-converted sequence typically is the sequence of the naturally occurring HPV nucleic acid.

[0134] The term “modifies” as used herein means the conversion of an cytosine to another nucleotide. Preferably, the agent modifies unmethylated cytosine to uracil to form a derivative nucleic acid.

[0135] The term “agent that modifies cytosine” as used herein means an agent that is capable of converting cytosine to another chemical entity. Preferably, the agent modifies cytosine to uracil which is then replaced as a thymine during amplification of the derivative nucleic acid. Preferably, the agent used for modifying cytosine is sodium bisulfite. Other agents that similarly modify cytosine, but not methylated cytosine can also be used in the method of the invention. Examples include, but not limited to bisulfite, acetate or citrate. Preferably, the agent is sodium bisulfite, a reagent, which in the presence of acidic aqueous conditions, modifies cytosine into uracil. Sodium bisulfite (NaHSO₃) reacts readily with the 5,6-double bond of cytosine to form a sulfonated cytosine reaction intermediate which is susceptible to deamination, and in the presence of water gives rise to a uracil sulfite. If necessary; the sulfite group can be removed under mild alkaline conditions, resulting in the formation of uracil. Thus, potentially all cytosines will be converted to uracils. Any methylated cytosines, however, cannot be converted by the modifying reagent due to protection by methylation. It will be appreciated that cytosine (or any other base) could be modified by enzymatic means to achieve a derivative nucleic acid as taught by the present invention.

[0136] There are two broad generic methods by which bases in nucleic acids may be modified: chemical and enzymatic. Thus, modification for the present invention can also be carried out by naturally occurring enzymes, or by yet to be reported artificially constructed or selected enzymes. Chemical treatment, such as bisulphite methodologies, can convert cytosine to uracil via appropriate chemical steps. Similarly, cytosine deaminases, for example, may carry out a conversion to form a derivative nucleic acid. The first report on cytosine deaminases to our knowledge is 1932, Schmidt, G., Z. physiol. Chem., 208, 185; (see also 1950, Wang, T. P., Sable, H. Z., Lampen, J. O., J. Biol. Chem, 184, 17-28, Enzymatic deamination of cytosines nucleosides). In this early work, cytosine deaminase was not obtained free of other nucleo-deaminases, however, Wang et al. were able to purify such an activity from yeast and E. coli. Thus any enzymatic conversion of cytosine to form a derivative nucleic acid which ultimately results in the insertion of a base during the next replication at that position, that is different to a cytosine, will yield a simplified genome. The chemical and enzymatic conversion to yield a derivative followed by a simplified genome are applicable to any nucleo-base, be it purines or pyrimidines in naturally occurring nucleic acids of microorganisms.

[0137] The term “simplified form of the HPV genome or nucleic acid” as used herein means that an HPV genome or nucleic acid, which usually contains the four common bases G, A, T and C, now consists largely of only three bases, G, A and T since most or all of the Cs in the genome have been converted to Ts by appropriate chemical modification and subsequent amplification procedures. The simplified form of the genome means that relative genomic complexity is reduced from a four base foundation towards a three base composition.

[0138] The term “base-like entity” as used herein means an entity that is formed by modification of cytosine. A base-like entity can be recognised by a DNA polymerase during amplification of a derivative nucleic acid and the polymerase causes A, G or T to be placed on a newly formed complementary DNA strand at the position opposite the base-like entity in the derivate nucleic acid. Typically, the base-like entity is uracil that has been modified from cytosine in the corresponding untreated nucleic acid. Examples of a base-like entity includes any nucleo-base, be it purine or pyrimidine.

[0139] The term “natural HPV genome” as used herein means the genome of a virus as it exists in nature. A natural HPV genome comprises a sequence of nucleotide bases forming an HPV nucleic acid molecule.

[0140] The term “relative complexity reduction” as used herein relates to probe length, namely the increase in average probe length that is required to achieve the same specificity and level of hybridization of a probe to a specific locus, under a given set of molecular conditions in two genomes of the same size, where the first genome is “as is” and consists of the four bases, G, A T and C, whereas the second genome is of exactly the same length but some cytosines, (ideally all cytosines), have been converted to thymines. The locus under test is in the same location in the original unconverted as well as the converted genome. On average, an 11-mer probe will have a unique location to which it will hybridize perfectly in a regular genome of 4,194,304 bases consisting of the four bases G, A, T and C, (4¹¹ equals 4,194,304). However, once such a regular genome of 4,194,304 bases has been converted by bisulfite or other suitable means, this converted genome is now composed of only three bases and is clearly less complex. However the consequence of this decrease in genomic complexity is that our previously unique 11-mer probe no longer has a unique site to which it can hybridize within the simplified genome. There are now many other possible equivalent locations of 11 base sequences that have arisen de novo as a consequence of the bisulfite conversion. It will now require a 14-mer probe to find and hybridize to the original locus. Although it may initially appear counter intuitive, one thus requires an increased probe length to detect the original location in what is now a simplified three base genome, because more of the genome looks the same, (it has more similar sequences). Thus the reduced relative genomic complexity, (or simplicity of the three base genome), means that one has to design longer probes to find the original unique site.

[0141] The term “relative genomic complexity reduction” as used herein can be measured by increased probe lengths capable of being HPV-specific as compared with unmodified DNA. This term also incorporates the type of probe sequences that are used in determining the presence of HPV. These probes may have non-conventional backbones, such as those of PNA or LNA or modified additions to a backbone such as those described in INA. Thus, a genome is considered to have reduced relative complexity, irrespective of whether the probe has additional components such as Intercalating pseudonucleotides, such as in INA. Examples include, but not limited to, DNA, RNA, locked nucleic acid (LNA), peptide nucleic acid (PNA), MNA, altritol nucleic acid (ANA), hexitol nucleic acid (HNA), intercalating nucleic acid (INA), cyclohexanyl nucleic acid (CNA) and mixtures thereof and hybrids thereof, as well as phosphorous atom modifications thereof, such as but not limited to phosphorothioates, methyl phospholates, phosphoramidites, phosphorodithiates, phosphoroselenoates, phosphotriesters and phosphoboranoates. Non-naturally occurring nucleotides include, but not limited to the nucleotides comprised within DNA, RNA, PNA, INA, HNA, MNA, ANA, LNA, CNA, CeNA, TNA, (2′-NH)-TNA, (3′-NH)-TNA, α-L-Ribo-LNA, α-L-Xylo-LNA, β-D-Xylo-LNA, α-D-Ribo-LNA, [3.2.1]-LNA, Bicyclo-DNA, 6-Amino-Bicyclo-DNA, 5-epi-Bicyclo-DNA, α-Bicyclo-DNA, Tricyclo-DNA, Bicyclo[4.3.0]-DNA, Bicyclo[3.2.1]-DNA, Bicyclo[4.3.0]amide-DNA, β-D-Ribopyranosyl-NA, α-L-Lyxopyranosyl-NA, 2′-R-RNA, α-L-RNA or α-D-RNA, β-D-RNA. In addition non-phosphorous containing compounds may be used for linking to nucleotides such as but not limited to methyliminomethyl, formacetate, thioformacetate and linking groups comprising amides. In particular nucleic acids and nucleic acid analogues may comprise one or more intercalator pseudonucleotides (IPN). The presence of IPN is not part of the complexity description for nucleic acid molecules, nor is the backbone part of that complexity, such as in PNA.

[0142] By “INA” is meant an intercalating nucleic acid in accordance with the teaching of WO 03/051901, WO 03/052132, WO 03/052133 and WO 03/052134 (Unest A/S) incorporated herein by reference. An INA is an oligonucleotide or oligonucleotide analogue comprising one or more intercalator pseudonucleotide (IPN) molecules.

[0143] By “HNA” is meant nucleic acids as for example described by Van Aetschot et al., 1995.

[0144] By “MNA” is meant nucleic acids as described by Hossain et al, 1998.

[0145] “ANA” refers to nucleic acids described by Allert et al, 1999.

[0146] “LNA” may be any LNA molecule as described in WO 99/14226 (Exiqon), preferably, LNA is selected from the molecules depicted in the abstract of WO 99/14226. More preferably, LNA is a nucleic acid as described in Singh et al, 1998, Koshkin et al, 1998 or Obika et al., 1997.

[0147] “PNA” refers to peptide nucleic acids as for example described by Nielsen et al, 1991.

[0148] “Relative complexity reduction” as used herein, does not refer to the order in which bases occur, such as any mathematical complexity difference between a sequence that is ATATATATATATAT (SEQ ID NO: 691) versus one of the same length that is AAAAAAATTTTTTT (SEQ ID NO: 692), nor does it refer to the original re-association data of relative genome sizes, (and inferentially, genomic complexities), introduced into the soientific literature by Waring, M. & Britten R. J. 1966, Science, 154, 791-794; and Britten, R. J and Kohne D E., 1968, Science, 161, 529-540, and earlier references therein that stem from the Carnegie Institution of Washington Yearbook reports.

[0149] An example clarifies the consequences of such a conversion process when applied to individual viral genomes, or to a mixture of viral genomes that occurs in a clinical sample containing both human cells and viral genomes, or parts thereof.

[0150] A normal 10 base genomic sequence which is 5′ GGGGAAATTC 3′ (SEQ ID NO: 693) (the ‘top’ strand) will have a complementary ‘bottom’ strand that is 5′ GAATTTCCCC 3′ (SEQ ID NO: 694). Following denaturation and bisulphite treatment, the ‘top’ strand becomes 5′ GGGGAAATTU 3′ (SEQ ID NO: 695) and the ‘bottom’ strand becomes 5′ GAATTTUUUU 3′ (SEQ ID NO: 696). Since cytosines have been converted to uracils, and uracils are equivalent to thymines in terms of recognition by DNA polymerase machinery ex vivo, the top strand derivative is essentially 5′ GGGGAAATTT 3′ (SEQ ID NO: 696) and the bottom strand derivative is 5′ GAATTTTTTT 3′ (SEQ ID NO: 697). Thus an initially normal genome has been converted from one in which the top and bottom strands between them had 5 Cs and 5 Ts, to a derivative population of polymers in which the top and bottom strands between them now have no Cs and 10 Ts. The normal genome has been reduced from a four base entity to a three base derivative. It has been “complexity-reduced”. In addition, a ‘locus’ in a derivative population refers only to positional coordinates within that derivative. After bisulphite conversion for example, a locus is stripped of all functional biological characteristics at any network level. If it was previously coding, regulatory or structural, it is now biological gibberish in both strands. A derivative population is thus a collection of functionless chemical polymers that now represent two non-complementary ghosts of the previously complementary strands of a genome that is now informationally impotent. Furthermore, the derivatives are unique and do not represent, except by statistical accident, sequences generated by normal evolutionary processes in any cellular, (or viral or viroid), life forms.

### Probes and Complexity-Reduction.

[0151] In the formal sense of molecular probes, we define herein ‘complexity-reduction’ in terms of the increase in probe length (IPL) that is required to achieve the same specificity and level of hybridization of a probe to a specific locus, under a given set of molecular conditions in two entities of the same size, the first being the normal genome and the second being the simplified sequence. For the purposes of molecular utility, IPL is an integer equal to or greater than 1. Each locus remains in the same location in the normal genome as well as the simplified nucleic acid.

[0152] Although it may appear counter intuitive, an increased oligonucleotide probe length may be required to detect the original locus in what is now a T-enriched simplified HPV nucleic acid. Thus the reduced-complexity of a simplified HPV nucleic acid means longer probes may need to be designed for the ‘top’ and ‘bottom’ strands of a locus to find the original unique site in the simplified HPV nucleic acid. However, as shown below, the use of Intercalating Nucleic Acid (INA) probes allows for much shorter probes than conventional oligonucleotides, and so overcomes this requirement for increased lengths, if required.

[0153] The principle of complexity-reduction, defined in terms of probe lengths and different probe sequences for ‘top’ and ‘bottom’ strands at a locus, is a relative term applicable to different structural or modified probes and primers in different molecular milieu. An example for INAs clarifies this relativity. The significant advantages of INAs over the standard oligonucleotide probes are that INAs can be made much shorter than conventional oligonucleotides and still achieve equivalent hybridization results, (INA length<oligonucleotide length). This is due to the high affinity of INA for complementary DNA owing to the Intercalating Pseudo Nucleotides, IPNs, that are a structural component of INAs. Thus if it requires an INA of length X nucleotides, with a given number of IPNs, to achieve successful and specific hybridization to an unconverted genome, it will still require an INA of length >X to hybridize to the same locus in a bisulphite converted genome under the same molecular conditions.

[0154] It is also particularly important to note that in the case of host-pathogen interactions, (where both viral and host genomes co-exist in the same clinical sample but in very different concentrations), ‘complexity-reduction’ and the use of INAs or other probes introduce new advantageous conditions into hybridization protocols, particularly since INAs have a preference for hybridizing to nucleic acid sequences that are AT-enriched. For example, in a pure solution of wild type HPV DNA, the approximate length of a viral probe or primer that is required to find and hybridize to a unique locus in the 7904 base HPV16 genome is approximately a 6-mer probe/primer, (46 equals 4096 bases). Following bisulphite treatment to generate a T-enriched simplified HPV nucleic acid, it now requires an approximately 8-mer probe or primer to find this unique location, (3⁸ equals 6561 bases) under the same molecular conditions.

[0155] However, when two grossly unequally sized genomes are initially present in a sample, such as the HPV genome of 7904 base pairs and the human genome of approximately 3,000,000,000 base pairs, and both genomes are ‘complexity-reduced’ to their respective derivatives, the probes or primers for a unique viral sequence now hybridize to their derivative targets in a solution that is overwhelmingly dominated by the T-enriched human simplified nucleic acid. If, for example, there was one simplified HPV nucleic acid for each human simplified nucleic acid in the sample, then viral probes or primers are hybridizing to a 3,000,007,904 base pair simplified nucleic acid. Hence assaying for a unique viral sequence now requires approximately 14-mer probes or primers, to avoid hybridization signals emanating from viral decoy loci that have newly arisen in human sequences.

[0156] In addition to ‘complexity-reduction’ issues involving probe and primer lengths, there are also important changes to the kinetics of hybridization and the ability to detect PCR products when the number of degenerate primers used in a PCR reaction is modest. Owing to the extensive genomic variation between HPV types, prior art amplifications have required the use of a large number of degenerate primers to produce relevant amplified nucleic acid products or amplicons from multiplex PCR reactions. However, the greater the degeneracy in the probe/primer pool, the lower is the concentration of any individual relevant probe or primer in solution. Such a situation has analogies to the kinetics and fidelity of hybridizations in the driver-tracer reactions carried out on complex eukaryotic genomes, and first introduced into the scientific literature in 1966 by Waring, M. & Britten R. J. Science, 154, 791-794; and in 1968 by Britten, R. J and Kohne D E., Science, 161, 529-540, (and earlier references therein that stem from the Carnegie Institution of Washington Yearbook reports).

[0157] In addition, when HPV PCR primers are in high concentration relative to human derivatives, the dominant force in the hybridization reaction is the HPV primer. For example, if the viral load in a sample is high, (say of the order of 100,000 HPV genomes to a single human genome), then the kinetics of hybridization of viral primers would be a 100,000 times faster than if there were only one HPV derivative per human derivative. In the former case the viral component behaves in solution as if it were a highly repetitive component of a genome. However, in order to detect different HPV types of different risk in a clinical sample by means of a single PCR reaction, different primers are typically required from each HPV type necessitating the use of degenerate entities. The net result is that the primer population can be combinatorially staggering in a conventional multiplex PCR reaction on mixed normal genomes. There can literally be thousands of different primers competing for hybridization sites with the net result that PCR amplifications fail, or the amplified nucleic acid product distribution becomes heavily biased in favour of a particular HPV type present in the sample. This presents a major problem for the generation of data from clinical samples in which conventional unconverted genomes are present.

[0158] The present invention of ‘complexity-reduction’, combined with the optional use of INA probes and primers overcomes many of the difficulties of these prior art problems.

[0159] The term “capable of specifically hybridizing” is used interchangeably with the term “capable of hybridizing under stringent conditions” herein to mean that nucleic acids having the ability to hybridize under stringent conditions with all or parts of an other nucleic acid molecule. Nucleotide sequence that is complementary with at least one helical turn (about 10 to 15 nucleotides) of a + or − strand of a DNA segment. By capable of hybridizing under stringent conditions it is meant that annealing the subject nucleic acid with at least a region of nucleic acid occurs under standard conditions, e.g., high temperature and/or low salt content, which tend to preclude hybridization of noncomplementary nucleotide sequences. An example of a stringent protocol for hybridization of nucleic acid probes to immobilised DNA (involving 0.1×SSC, 68° C. for 2 hours) is described in Maniatis, T., et al., Molecular Cloning: A Laboratory Manual, Cold Springs Harbor Laboratory, 1982, at pages 387-389, although conditions will vary depending on the application.

[0160] The term “nucleotide sequence” is used herein to refer to a sequence of nucleosides or nucleotides.

[0161] The term “contiguous nucleotide sequences” is used herein to refer to a sequence of nucleotides linked in a serial array, one following the other.

[0162] The term “PCR” (polymerase chain reaction) is used herein to refer to the process of amplifying DNA segments through the use of a DNA template molecule, two oligonucleotide primers, and a DNA polymerase enzyme. The DNA template is dissociated at high temperature from primers that may be annealed to the template. The DNA polymerase copies the template starting at the primers. The process is repeated about 30 to 40 times to amplify and enrich the template-specific molecules in the reaction product.

### Primers and Complexity-Reduction

[0163] It should be noted that complexity-reduction differs depending upon whether the population of molecules that has been converted, (the derivatives), remains in the converted state, or is subjected to further amplification. In the examples discussed above, the derivative population remained unamplified, as it would exist in a clinical sample. Recall that the top strand (5′ GGGGAATTC 3′) (SEQ ID NO: 693), and the bottom strand (5′ GAATTTCCCC 3′) (SEQ ID NO: 694), were converted to 5′ GGGGAAATTU 3′ (SEQ ID NO: 695) and 5′ GAATTTUUUU 3′ (SEQ ID NO: 696) respectively. Since cytosines have been converted to uracils, and uracils are equivalent to thymines in terms of recognition by DNA polymerase machinery ex vivo, the top strand derivative is essentially 5′ GGGGAAATTT 3′ (SEQ ID NO: 697) and the bottom strand derivative is 5′ GAATTTTTTT 3′ (SEQ ID NO: 698). However, if the derivative population is now replicated ex vivo by enzymological means, four distinct derivative populations ensue, these being [5′ GGGGAAATTT 3′] (SEQ ID NO: 697), [5′ AAATTTCCCC 3′] (SEQ ID NO: 699), [5′ AAAAAAATTC 3′] (SEQ ID NO: 700) and [GAATTTTTTT 3′] (SEQ ID NO: 698). These derivatives are indeed complexity reduced, but not to the same extent as the original unreplicated derivatives that exist immediately after conversion. Hence when PCR primers are made to the original non-replicated derivative strands, it is necessary to judiciously decide which amplified nucleic acid products one wishes to examine, as the choice of primers to either the top or bottom strands will influence the output. The differences between dealing with two non-complementary derivative populations that constitute the output of a converted genome, versus the four derivative populations that exist after replication are not intuitively clears, but can have important implications for primer design.

[0164] Finally, the issue of longer probes or primers that was introduced earlier to formalize and quantitated ‘complexity-reduction’ only assumes relevance when searching for a unique sequence within a derivative population of molecules. An important foundation of the present invention, however, can be the choice of derivative loci that are maximally similar between HPV types, allowing all HPV types to be assayed in one initial test, if required. These chosen loci will vary depending upon whether the top or bottom strand derivatives are chosen and such loci will be in different regions in the top strand as compared to the bottom strand.

[0165] The practical-importance of the requirement for longer probes and primers in derivative populations is overshadowed by the practical advantages that are gained for HPV detection owing to the generation of loci that are rendered more sequence similar by conversion using the HGS bisulphite treatment in the present invention. They are also overshadowed by the optional use of INAs that allow for shorter probe and primer molecules than is the case for conventional oligonucleotides. In addition, application of the nested PCR approach to derivative populations requires two primers to bind in the same neighbourhood in order to allow for amplified nucleic acid product production. If one of the PCR primers has sequence similarity to a decoy locus that is outside the targeted neighbourhood, it is unlikely that the other member of its primer pair would also have a decoy locus nearby in the same non-targeted region. It is even more unlikely that the inner primers of such a nested PCR approach would again have decoy loci in the same non-targeted region as the first round primers. The probability of spurious amplification is extremely unlikely.

### Human Papilloma Virus

[0166] The term “viral-specific nucleic acid molecule” as used herein means a molecule which has been determined or obtained using the method according to the present invention which has one or more sequences specific to a virus or virus type.

[0167] The term ‘taxonomic level of the virus’ as used herein includes type, subtype, variant and genotype. The fluidity of viral genomes is recognized. Different viral populations may furthermore be polymorphic for single nucleotide changes or be subject to hyper- or hypo-mutability if they reside within certain cancerous cells where normal DNA repair processes are no longer functioning.

[0168] The term “HPV-specific nucleic acid molecule” as used herein means a specific nucleic acid molecule present in treated or converted viral DNA which can be indicative of the virus or virus type.

[0169] The term “HPV type” as used herein refers to any existing or new HPV population where there is less than 90% sequence similarity with previously isolated and characterized HPV types, (1993, Van Rast, M. A., et al., Papillomavirus Rep, 4, 61-65; 1998, Southern, S. A. and Herrington, C. S., Sex. Transm. Inf. 74, 101-109).

[0170] The term “HPV subtype” as used herein refers to any existing or new HPV population where the sequence similarity is in the 90-98% range relative to previous subtypes, (1993, Van Rast, M. A., et al., Papillomavirus Rep, 4, 61-65; 1998, Southern, S. A. and Herrington, C. S., Sex. Transm. Inf. 74, 101-109).

[0171] The term “HPV variant” as used herein refers to any existing or new HPV population where the sequence similarity is between 98-100% of previous variants, (1993, Van Rast, M. A., et al., Papillomavirus Rep, 4, 61-65; 1998, Southern, A. and Herrington, C. S. Sex. Transm. Inf. 74, 101-109).

[0172] The term “HPV genotype” as used herein is as follows; a genotype is any fully sequenced HPV genome that minimally differs by one base from any other fully sequenced HPV genome including whether that single base exists as either a G, A, T or C, or whether the base at a given position in the standard comparator, (namely HPV16 from position 1 to position 7904) has been altered by deletion, addition, amplification or transposition to another site. We compare all other HPV genotypes relative to the HPV16 standard using prior art BLAST methodologies.

[0173] All the bioinformatic HPV comparisons used in the present patent specification were made relative to the HPV16 genome (using positions 1 to 7904 of HPV16 as the standard comparator), and using prior art BLAST methodologies, (1996, Morgenstern, B., et al., Proc. Natl. Acad. Sci. USA. 93, 12098-12103). The standard HPV ‘type’ utilized herein for reference purposes is HPV16 of the Papillomaviridae, a papillomavirus of 7904 base pairs (National Center for Biotechnology Information, NCBI locus NC_{—}001526; version NC_{—}001526.1; GI:9627100; references, Medline, 91162763 and 85246220; PubMed 1848319 and 2990099).

### Primers for Amplification Via PCR.

[0174] The amplification methodology according to the present invention consists of an oligonucleotide primer set directed to the genomically simplified top and/or bottom strands of HPV. The list of such primers that have produced HPV-specific products from both liquid based cytology and archival paraffin samples from human patients is summarized in Table 1. Most primers are directed to the top strand derivatives of the different HPV types, but a smaller number have been directed towards the bottom strand derivative (HPVB).

TABLE 1

Examples of 516 forward and reverse primers
suitable for detection of various types of
HPV, using either the top or bottom
derivative strands of HPV.

| | | |
|---|---|---|
| | | SEQ |
| | | ID |
| Primer | Sequence | NO |

| | | |
|---|---|---|
| HPV11-E4-1 | ATTATTGGGAAGTATGTTATGGTAGT | 1 |
| HPV11-E4-2 | GTTTTTTTGTATTTGTATTTAGT | 2 |
| HPV11-E4-3 | TACTTATTATAATTATCAATAAC | 3 |
| HPV11-E4-4 | AAATCACCTTACAATTACACTATAAAC | 4 |
| HPV11-E7-1 | GTTATGAGTAATTAGAAGATAGT | 5 |
| HPV11-E7-2 | ATTATTAAATATTGATTTGTTGT | 6 |
| HPV11-E7-3 | ATACCTATAATATACTCTACTATAAC | 7 |
| HPV11-E7-4 | CAAAATTTTATATAATATACCTATC | 8 |
| HPV16-E4-1 | GAATATATTTTGTGTAGTTTAAAGATGATGT | 9 |
| HPV16-E4-2 | GTTTTATATTTGTGTTTAGTAGT | 10 |
| HPV16-E4-3 | CCTTTTAAATATACTATAAATATAATATTAC | 11 |
| HPV16-E4-4 | CACACAATATACAATATACAATAC | 12 |
| HPV16E5-1 | GTTTATATGATAAATTTTGATATTGT | 13 |
| HPV16E5-2 | TTGTGTGTTTTTGTGTGTTTGTT | 14 |
| HPV16E5-3 | ATATTAAAAATAATAATATATAAAC | 15 |
| HPV16E5-E | ATATATAACAATTACATTATATAC | 16 |
| HPV16-E6-1 | GAAAGTTATTATAGTTATGTATAGAGT | 17 |
| HPV16-E6-2 | ATTAGAATGTGTGTATTGTAAGTAAT | 18 |
| HPV16-E6-3 | ACTACAATATAAATATATCTCCATAC | 19 |
| HPV16-E6-4 | AAACTATCATTTAATTACTCATAAC | 20 |
| HPV16-E7-1 | TATGTATGGAGATATATTTATATTGT | 21 |
| HPV16-E7-2 | GTTATGAGTAATTAAATGATAGTTT | 22 |
| HPV16-E7-3 | TAAAACACACAATTCCTAATATAC | 23 |
| HPV16-E7-4 | CCCATTAATACCTACAAAATCAAC | 24 |
| HPV18-E4-1 | GGGAATATAGGTAAGTGGGAAGTAT | 25 |
| HPV18-E4-2 | GATTGTAATGATTTTATGTGTAGTATT | 26 |
| HPV18-E4-3 | AAATAATATATCTCTATAATAATC | 27 |
| HPV18-E4-4 | TTCATTACCTACACCTATCCAATACC | 28 |
| HPV18E5-1 | ATATGATAATGTAATATATATGT | 29 |
| HPV18E5-2 | GTGTATGTATGTATGTGTGTTGTT | 30 |
| HPV18E5-3 | CATATATATACAATAATAACATAAAC | 31 |
| HPV18E5-4 | CAACCTATACAATTACTATAAAAAC | 32 |
| HPV18-E6-1 | GATAGTATATAGTATGTTGTATGTT | 33 |
| HPV18-E6-2 | ATTTAGATTTTGTGTATGGAGATAT | 34 |
| HPV18-E6-3 | ATCTTACAATATTACCTTAAATCCATAC | 35 |
| HPV18-E6-4 | AAATTTCATTTTAAAACTCTAAATAC | 36 |
| HPV18-E7-1 | GTATGGATTTAAGGTAATATTGTAAGAT | 37 |
| HPV18-E7-2 | GTATTTAGAGTTTTAAAATGAAATTT | 38 |
| HPV18-E7-3 | AACACACAAAAAACAAAATATTC | 39 |
| HPV18-E7-4 | ACCATTATTACTTACTACTAAAATAC | 40 |
| HPV26E4-1 | GTATTTAGTATTTGTAGTAGT | 41 |
| HPV26E4-2 | TTATTGTTAAAATTGTTGAGTT | 42 |
| HPV26E4-3 | AATAATAACCTCCACTTATAC | 43 |
| HPV26E4-4 | AAATATACTATAAACACAATTTAATC | 44 |
| HPV26E6-1 | GTTTGAATATTATTTTGTAAAATTTGT | 45 |
| HPV26E6-2 | TATTGTAAGGAAATTTTATAATGGGT | 46 |
| HPV26E6-3 | CTTTATTTTTCTTCTAACCCCAATAAC | 47 |
| HPV26E6-4 | ATACACAACCCTTTCCACTACCCTAC | 48 |
| HPV26E7-1 | GAAATATAAGTGTAAAGAATAATGT | 49 |
| HPV26E7-2 | GAATAATTGGATTATGAATAATTTGAT | 50 |
| HPV26E7-3 | TCTTCCATTAACATCTACTCCAAC | 51 |
| HPV26E7-4 | TTACTATACAACACACTAATAAC | 52 |
| HPV30-E4-1 | GTATAAAGGTATATGGGAAGTGT | 53 |
| HPV30-E4-2 | GATTTTGTGTTTAGTATTTTTAGATT | 54 |
| HPV30-E4-3 | CATATAACTCCACCAAAACACTATC | 55 |
| HPV30-E4-4 | TCTATTTAATTCACCTTTTAAATAC | 56 |
| HPV30E6-1 | GTATAGTTTATAGAAAGGGAGTGAT | 57 |
| HPV30E6-2 | GTATTAAAYGGATAGTGTATTTATGGT | 58 |
| HPV30E6-3 | TACACACTACATATAAACTA | 59 |
| HPV30E6-4 | CCCATACAATAAATAATTATAATATC | 60 |
| HPV30-E7-1 | GATAATTTATAGAAGTAGTTATAGT | 61 |
| HPV30-E7-2 | TTTTGTTATTTAATTAATATATAG | 62 |
| HPV30-E7-3 | CCCATCTAAATCTAATACTATAC | 63 |
| HPV30-E7-4 | CTATATTATTATTACATTACTATTATC | 64 |
| HPV31-E4-1 | TTTTTGAATTTGTATTTAGT | 65 |
| HPV31E4-1A | GAATTAAATATTTTTATAGTAAGT | 66 |
| HPV31-E4-2 | ATTTTTTGTTGGGATTGTTATAAAGT | 67 |
| HPV31E4-2A | GTGTTATTATTTGTGTGTTTTGTT | 68 |
| HPV31-E4-3 | TCAATAACCCCACAATTAACACTATC | 69 |
| HPV31E4-3A | ATAATAAAATATATATAAACAC | 70 |
| HPV31-E4-4 | CTTATTTAATTTATACATACAACTAC | 71 |
| HPV31E4-4A | AAAAAATACATATATATAAATTAC | 72 |
| HPV31E6-1 | TTTAGTATAAAAAAGTAGGGAGTGAT | 73 |
| HPV31E6-2 | GGTATATAAAGTATATAGTATTTTGTGT | 74 |
| HPV31E6-3 | AATCTTAAACATTTTATACACACTC | 75 |
| HPV31E6-4 | CACACTATATCTATACCATCTAAATTC | 76 |
| HPV31-E7-1 | GTAATTGATTTTTATTGTTATGAGT | 77 |
| HPV31-E7-2 | GTTATAGATAGTTTAGTTGGATAAGT | 78 |
| HPV31-E7-3 | CTAAATCAACCATTATAATTACAATC | 79 |
| HPV31-E7-4 | CCTATCTATCTATCAATTACTAC | 80 |
| HPV33-E4-1 | GTGGGTGGTTAGGTAATTGTTTGTT | 81 |
| HPV33E4-1A | GTAAAAATATTATTTATTGTGT | 82 |
| HPV33-E4-2 | TTAAATATTTATTATTGAAATTGT | 83 |
| HPV33E4-2A | GTGTATATTATAAGTTAATATGTGT | 84 |
| HPV33-E4-3 | CCTTTTAAATACACTATAAATAC | 85 |
| HPV33E4-3A | AAAAATCCCACAAACACCCAAAACAAC | 86 |
| HPV33-E4-4 | CTAATCCAATACCAAATAAATAAC | 87 |
| HPV33E4-4A | TACTCTTATTATATCATATACTATAC | 88 |
| HPV33E6-1 | GTATATATAAAGTAAATATTTTGT | 89 |
| HPV33E6-2 | GGTATTGTAYGATTATGTTTTAAGAT | 90 |
| HPV33E6-3 | CTCTATATACAACTATTAAATCTAC | 91 |
| HPV33E6-4 | CCATATACAAAATAATTATAATATC | 92 |
| HPV33-E7-1 | TTTTGTATATGGAAATATATTAGAAT | 93 |
| HPV33-E7-2 | TAGGTGTATTATATGTTAAAGATT | 94 |
| HPV33-E7-3 | CCTCATCTAAACTATCACTTAATTAC | 95 |
| HPV33-E7-4 | TAACTAATTATACTTATCCATCTAAC | 96 |
| HPV35-E4-1 | GGGTGGTTAGGTAATTGTTTGTTT | 97 |
| HPV35E4-1A | GGATATATGTTTATATGATAGATT | 98 |
| HPV35-E4-2 | ATTTATTGTTGAAATTGTTATATAGT | 99 |
| HPV35E4-2A | ATAGTTTTTAGTATTGTGTTGT | 100 |
| HPV35-E4-3 | CAAATATAAAATAAACCCCTCTATC | 101 |
| HPV35E4-3A | CAATTACTATACTACCAAATATTATAC | 102 |
| HPV35-E4-4 | ATATACTATAAATATAATTATAC | 103 |
| HPV35E4-4A | CCACCATACACACATATTACACAATAC | 104 |
| HPV35E6-1 | GGTTGTTATAAAAGTAGAAGTGT | 105 |
| HPV35E6-2 | AAAAGTAGAAGTGGATAGATATTG | 106 |
| HPV35E6-3 | ACACAAATCATAACATACAAAATC | 107 |
| HPV35E6-4 | ATACATACTCCATATAACTAACC | 108 |
| HPV35-E7-1 | AAATAATGTAATAAATAGTTATGTT | 109 |
| HPV35-E7-2 | GTTGTGTTTAGTTGAAAAGTAAAGAT | 110 |
| HPV35-E7-3 | CCATATATATACTCTATACACACAAAC | 111 |
| HPV35-E7-4 | AAACACACTATTCCAAATATAC | 112 |
| HPV39-E4-1 | GTAAATGGGAAGTGTATTATAATGGT | 113 |
| HPV39-E4-2 | AATTTATTGTTTTGATTTTATGTGT | 114 |
| HPV39-E4-3 | AATTATTAAAATAATCCAAAAAC | 115 |
| HPV39-E4-4 | TAATATTACCACAACTAAAATAC | 116 |
| HPV39E5-1 | GTATATGTTTTATTGGGTTATATGAT | 117 |
| HPV39E5-2 | GTATATATATATGTTGTAATGTT | 118 |
| HPV39E5-3 | ATCTATACAACAACCACATAAAC | 119 |
| HPV39E5-4 | CAATACTATATCATATCCATTAC | 120 |
| HPV39E6-1 | TTTATAATATTTTATAAGTATT | 121 |
| HPV39E6-2 | GTTTAAAAAAAGGGAGTAAT | 122 |
| HPV39E6-3 | CATAATTAACATACAACTAATAATTC | 123 |
| HPV39E6-4 | ATTATATTTTCTAATATAATTAC | 124 |
| HPV39-E7-1 | TTAAAGTTTATTTTGTAGGAAATTG | 125 |
| HPV39-E7-2 | GATTTATGTTTTTATAATGAAATATAGT | 126 |
| HPV39-E7-3 | CTAATAAATCCATAAACAACTAC | 127 |
| HPV39-E7-4 | CATAACAAATTACTAATTTACATTTAC | 128 |
| HPV40E4-1 | ATGTAGATTTTGTAAAGGAAGTAT | 129 |
| HPV40E4-2 | GGATTATTTATTGTTGAGATTGT | 130 |
| HPV40E4-3 | CCTATACCCRTTATTACTTTCAAAATC | 131 |
| HPV40E4-4 | TCTAAAACACTTTAAACAATTAAC | 132 |
| HPV40E6-1 | GATTTTGTATGAATTGTGTGATTAGTGT | 133 |
| HPV40E6-2 | GTTTTAAAAATAGTTGAGGTATTGGTT | 134 |
| HPV40E6-3 | CAAAAACTTATAACACTTACAAC | 135 |
| HPV40E6-4 | TCCAACAATATAAACAATACCCTATC | 136 |
| HPV40E7-1 | GTATTTTGAATTTGTATGTTTAAATTGT | 137 |
| HPV40E7-2 | GATAGTTTAGATTTAGAAGATGAT | 138 |
| HPV40E7-3 | TATATAATATACCCATCAACAACTAC | 139 |
| HPV40E7-4 | CACTCTATAACTACACAATTAAAAC | 140 |
| HPV42-E4-1 | GTAGAGATATTTTTTATTGGATT | 141 |
| HPV42-E4-2 | GTTGGTATAATAAGTGTGTAT | 142 |
| HPV42-E4-3 | ATTCTAACCCCACACAATCCAAAATC | 143 |
| HPV42-E4-4 | TAACCTAACTTCCACAATAATTC | 144 |
| HPV42-E7-1 | GTATATAGTGGAGAAAGAAATTGGAT | 145 |
| HPV42-E7-2 | GAATAATAAATTAGATGTGTTTTGTGTT | 146 |
| HPV42-E7-3 | CCAATTATTCATAACAATACAAATC | 147 |
| HPV42-E7-4 | ACTTAATCATCTTCATCTAAAC | 148 |
| HPV43-E4-1 | TTATATATAGTATGTGGGTAAAAGT | 149 |
| HPV43-E4-2 | TTTTTGTATTTGTATTTAGTAT | 150 |
| HPV43-E4-3 | ATTATACCCTCTAAAATAATAATC | 151 |
| HPV43-E4-4 | ACTTCACCTTATAACTATATTATAAAC | 152 |
| HPV43E6-1 | TTATACTTGTAGTTTAAGGTGGGAT | 153 |
| HPV43E6-2 | TTATAGTTTGTGGGGTATAATGAT | 154 |
| HPV43E6-3 | TTTTCCATAAAACTATAAACAAAC | 155 |
| HPV43E6-4 | TATAACACTTACAACATCTAATAC | 156 |
| HPV43-E7-1 | GTATAGTATATTGTGTAAAAGGT | 157 |
| HPV43-E7-2 | TTGTTTATATTGTTGGAAATTATGT | 158 |
| HPV43-E7-3 | CTTAATATCACTATCAAAACACTAC | 159 |
| HPV43-E7-4 | TTTTAATATACCCAACAACAAATC | 160 |
| HPV44-E4-1 | GAYGTATTTATTGTTGGGTTTGT | 161 |
| HPV44-E4-2 | GGTTTTATTTATATTGTTTATTGGT | 162 |
| HPV44-E4-3 | TACCTATACAATAATTATTATC | 163 |
| HPV44-E4-4 | TCACCTTATAATTAAACTACAAAC | 164 |
| HPV44-E7-1 | GGAAATTTTTTATTTGTAGTTTGTGTT | 165 |
| HPV44-E7-2 | ATAAGGTAAGGTTAATTAATTTAGGT | 166 |
| HPV44-E7-3 | CCTTTAAAATAATATAATTTCCATAC | 167 |
| HPV44-E7-4 | CCTACAAAATCAAAAAATTCCAAC | 168 |
| HPV45E4-1 | GTGGGAAGTATAATATGGGGGT | 169 |
| HPV45E4-2 | GTAATGATTTTATGTGTAGTATT | 170 |
| HPV45E4-3 | TATTACTTATACTTAAACACAAAAAC | 171 |
| HPV45E4-4 | TATCACCTTTTAAATATATTATAAAC | 172 |
| HPV45E6-1 | ATATTATATAAAAAAGGGTGTAAT | 173 |
| HPV45E6-2 | GTATATAAAAGTTTTGTGGAAAAGTGT | 174 |
| HPV45E6-3 | TACACTATACATAAATCTTTAAAAAC | 175 |
| HPV45E6-4 | TACATTTATAACATACAACATATAC | 176 |
| HPV45-E7-1 | GTAAGAAATTGTATTGTATTTGGAATT | 177 |
| HPV45-E7-1A | GTAAGAAATTGTATTGTATTTGGAATT | 178 |
| HPV45-E7-2 | GAATGAATTAGATTTTGTTGATTTG | 179 |
| HPV45-E7-2A | GAATGAATTAGATTTTGTTGATTTG | 180 |
| HPV45-E7-3 | CAACTACTATAATATTCTAAAATC | 181 |
| HPV45-E7-3A | CAACTACTATAATATTCTAAAATC | 182 |
| HPV45-E7-4 | AACACACAAAAAACAAAATACTC | 183 |
| HPV45-E7-4A | AACACACAAAAAACAAAATACTC | 184 |
| HPV51-E4-1 | TATATGGGGTATAATAGTGGGAGGTT | 185 |
| HPV51-E4-2 | GTTTTGAATATGTATTTAGTATTTGT | 186 |
| HPV51-E4-3 | CTTTAATACCCTCCAATATTAATAC | 187 |
| HPV51-E4-4 | CAATTTATATCACCTTTTAAATAC | 188 |
| HPV51-E7-1 | TTGTGTATGGTATTATATTAGAGGT | 189 |
| HPV51-E7-2 | GATGTTAAAGATTATTTGGGTT | 190 |
| HPV51-E7-3 | TCCTCTAAACTATCAAATTAC | 191 |
| HPV51-E7-4 | CAACCCRTCTTTCTAATAACTAATC | 192 |
| HPV52E4-1 | GGTGGTTAGGTAATTGTTTGTTTTGT | 193 |
| HPV52E4-2 | ATTGAAATTGTTGTTTATTTATGT | 194 |
| HPV52E4-3 | CTTTATTTATACACTCAATTACAATAAC | 195 |
| HPV52E4-4 | TAAATACAATACAAATTATATATAC | 196 |
| HPV52-E7-1 | TTTGAAATAATTGATTTATATTGT | 197 |
| HPV52-E7-2 | ATGAGTAATTAGGTGATAGT | 198 |
| HPV52-E7-3 | CTATACCTTCAAAATCCTCCATTAC | 199 |
| HPV52-E7-4 | TTATTACCTCTACTTCAAACCAAC | 200 |
| HPV53E4-1 | TATGGGAAAATAAAGTATTTATTGTTT | 201 |
| HPV53E4-2 | GATTTTGTGTTTAGTATTTTTAGATT | 202 |
| HPV53E4-3 | ATTTATATTATCTATATTCCTTAC | 203 |
| HPV53E4-4 | CAAATACAATCTTATAACCACTATC | 204 |
| HPV53-E7-1 | TAGTGTAYGGGGTTAGTTTGGAAGT | 205 |
| HPV53-E7-2 | ATTTGATTTATTAATAAGGTGT | 206 |
| HPV53-E7-3 | CTATAATATATTATAAAAATATTAATAC | 207 |
| HPV53-E7-4 | CAATTACTCATAACATTACAAATC | 208 |
| HPV54-E4-1 | GGGAGGTGYGTATGGGTAGTAGT | 209 |
| HPV54-E4-2 | GGTATTGTTGAATATATTAGATTAGTT | 210 |
| HPV54-E4-3 | ATAATATCACCACTACTTATATAC | 211 |
| HPV54-E4-4 | CCTAAAACATTTTAATATATTAAATTC | 212 |
| HPV54-E7-1 | AGGATTTATTTGTGGTGTGGAGAT | 213 |
| HPV54-E7-2 | GTATGTGTATTGTGTTTAGAATTGT | 214 |
| HPV54-E7-3 | ACATTATAACTTCCAACAATATAAAC | 215 |
| HPV54-E7-4 | CAAAAACTATATCCTCAATTATAAC | 216 |
| HPV55-E4-1 | GGAGGTTTGTATTGGTAGTAGTGTT | 217 |
| HPV55-E4-2 | GTATTTATATTTAGTATTGTGT | 218 |
| HPV55-E4-3 | AATAAATATTATTATTTATACTATC | 219 |
| HPV55-E4-4 | AAATCACCTTATAATTAAACTACAAAC | 220 |
| HPV55-E7-1 | GGTTAATTAATTTAGGTATTTTGAT | 221 |
| HPV55-E7-2 | GTATTAATAGTGGAAGAAGAGAT | 222 |
| HPV55-E7-3 | CCTACAAAATCAAAAAAATCCAAC | 223 |
| HPV55-E7-4 | AACTAATTCATCCACCTCATCCTCTAAAC | 224 |
| HPV56E4-1 | ATTATATAGATTTTGAATAAGAGGTT | 225 |
| HPV56E4-2 | GAAAATGAGAGTATTTATTGTTTTGAT | 226 |
| HPV56E4-3 | ATTATTAATACTTCTACTTCTACTATC | 227 |
| HPV56E4-4 | AATTCACCTTTTAAATATACTACAAAC | 228 |
| HPV56E6-1 | TATTTTTATATATTGGGAGTGAT | 229 |
| HPV56E6-2 | TTGTGTGGATATATTTATGGAGTT | 230 |
| HPV56E6-3 | CACTAATTTTAATTCAATACATAC | 231 |
| HPV56E6-4 | CAATAAACATACTCTACACACTAC | 232 |
| HPV56-E7-1 | GATTTATAGTGTAATGAGTAATTGGATAGT | 233 |
| HPV56-E7-1A | GATTTATAGTGTAATGAGTAATTGGATAGT | 234 |
| HPV56-E7-2 | GGTTATAGTAAGTTAGATAAGT | 235 |
| HPV56-E7-2A | GGTTATAGTAAGTTAGATAAGT | 236 |
| HPV56-E7-3 | TCCCCATCTATACCTTCAAATAAC | 237 |
| HPV56-E7-3A | TCCCCATCTATACCTTCAAATAAC | 238 |
| HPV56-E7-4 | CCTATTTTTTTTTCTACAATTAC | 239 |
| HPV56-E7-4A | CCTATTTTTTTTTCTACAATTAC | 240 |
| HPV57E4-1 | GGATTTTGGAATAGAGGTTTTGATT | 241 |
| HPV57E4-2 | GTATTTGTGTTTAGTATTTAGGT | 242 |
| HPV57E4-3 | TAAAATCRAACTATTACCACTACTATC | 243 |
| HPV57E4-4 | TTTAACACTCCACCTACCCTTCTCTAAC | 244 |
| HPV57E6-1 | GTTTTAGGAATATTTTTTTGT | 245 |
| HPV57E6-2 | GTGTAGAGAGTATGGTTTGGAGT | 246 |
| HPV57E6-3 | CCAATACCTATATTATCTAAATTTTAC | 247 |
| HPV57E6-4 | CAACTAAAATATAAATAATCCTATC | 248 |
| HPV57E7-1 | GATAATTTAGAAGAAGATAT | 249 |
| HPV57E7-2 | AATTGATAGAATTAGTTGTGTAGGTT | 250 |
| HPV57E7-3 | CATAAATTATTATAACTTCCACATAAAAC | 251 |
| HPV57E7-4 | CCTCATCCTCRTCACTAAATACCTAAC | 252 |
| HPV58-E4-1 | GTTTTATATTTATATTTAGTGATT | 253 |
| HPV58E4-1A | GTAAATTATAAGTTAATATGTGTTGT | 254 |
| HPV58-E4-2 | ATTGAAATTGTTGATTTAAAGATT | 255 |
| HPV58E4-2A | GTTTTATATTGTTTTTATGTTTGTGT | 256 |
| HPV58-E4-3 | TACACRATAAATAAAACTTTAAAAC | 257 |
| HPV58E4-3A | TAACTTTATTAAATTAAATATTATAC | 258 |
| HPV58-E4-4 | TAAACATTTTAAACTATTTAAATC | 259 |
| HPV58E4-4A | TACCATACCACCATATACAAAAC | 260 |
| HPV58E6-1 | TTAAATTATAATGTTAAATTTTG | 261 |
| HPV58E6-2 | GTAGATATTTTTTGGTAGGTTATTGT | 262 |
| HPV58E6-3 | TTACATACTACAAATAAATTTC | 263 |
| HPV58E6-4 | TATCTATACTCACTTATTTTAAATAAC | 264 |
| HPV58-E7-1 | TATTTTGAATTAATTGATTTATTTTGT | 265 |
| HPV58-E7-2 | ATGAGTAATTATGTGATAGTTT | 266 |
| HPV58-E7-3 | ATACATATACCCATAAACAACTAC | 267 |
| HPV58-E7-4 | TTATTACTATACACAACTAAAAC | 268 |
| HPV66-E4-1 | TATATAGATTTTGAATAGGAGGTT | 269 |
| HPV66-E4-2 | GAGTATTTATTGTTTTGATTTTGTGTT | 270 |
| HPV66-E4-3 | TAATTTTATCACCACAATAAC | 271 |
| HPV66-E4-4 | CACCTTTTAAATAAATTACAAAC | 272 |
| HPV66-E7-1 | GTATTATAAATATTTAGTGTATGGGGT | 273 |
| HPV66-E7-2 | GTTATTTGATTTATTAATAAGGTGT | 274 |
| HPV66-E7-3 | TCCAATTACTCATTACATTATAAATC | 275 |
| HPV66-E7-4 | TATATTATTCAACTTATCTAAC | 276 |
| HPV6-E4-1 | AATAATGGGAAGTATGTTATGGTAGT | 277 |
| HPV6-E4-2 | TATATAAGAAGTATTTATTTTTG | 278 |
| HPV6-E4-3 | TACTATCACATCCACAACAACAAATC | 279 |
| HPV6-E4-4 | CTCTAATATCTATTTCTATACACTAC | 280 |
| HPV6-E7-1 | GATATTTTGATTATGTTGGATATGT | 281 |
| HPV6-E7-2 | GTTGAAGAAGAAATTAAATAAGAT | 282 |
| HPV6-E7-3 | TACTATCACATCCACAACAACAAATC | 283 |
| HPV6-E7-4 | CTCTAATATCTATTTCTATACACTAC | 284 |
| HPV73E4-1 | GGGTGGTTAGGTAATATGTTGTGT | 285 |
| HPV73E4-2 | TTTGAAATTGTTAATTTATTGT | 286 |
| HPV73E4-3 | CATTATATATAATACACTAAATAC | 287 |
| HPV73E4-4 | ACTATTTTTATCACCTTTTAAATAC | 288 |
| HPV73E6-1 | AAATTTGGATTGTGTGTTTTGTT | 289 |
| HPV73E6-2 | GAAAGGATAAATTATATGGTGTATGT | 290 |
| HPV73E6-3 | CATACTTTTACTTTTCCAATAAAC | 291 |
| HPV73E6-4 | CCACAATTACAAATAATCTCCAAC | 292 |
| HPV73E7-1 | GTATGGAAAAAAAATAATTTTGT | 293 |
| HPV73E7-2 | GATTTTATATGTTAYGAGTTATTGGAT | 294 |
| HPV73E7-3 | CACAATACCTAATATACCCATAAAC | 295 |
| HPV73E7-4 | TAAATTTCTAAAACAATTAAAAC | 296 |
| HPV82E4-1 | GTGTGGTAATGTAATAATATGTTT | 297 |
| HPV82E4-2 | TTTTATTATAATTGTTGAATAGT | 298 |
| HPV82E4-3 | CAATTTTAATTACACTAAAATACC | 299 |
| HPV82E4-4 | CTTAAACATTTTAAACAATTTATTAC | 300 |
| HPV82E6-1 | GAGTAGATGTGTATAATGTAGT | 301 |
| HPV82E6-2 | GTTATATGTAGTATGTAAAAAATGTT | 302 |
| HPV82E6-3 | CACCACCTTTTACTTTTCTTCAAAC | 303 |
| HPV82E6-4 | TTATCTTAATAATTTTCTACAATTTAC | 304 |
| HPV82E7-1 | AATTTGAAATTGATTTGTAATGT | 305 |
| HPV82E7-2 | GTGATTAGTTAGTTAGATAAGT | 306 |
| HPV82E7-3 | CACACCACRAACACACCAAAC | 307 |
| HPV82E7-4 | CTCTATACCTTCACTATCCATTAC | 308 |
| HPV83E4-1 | GATTTTGTATTTAGTATTTAGGAT | 309 |
| HPV83E4-2 | TTTGTTGTAATTAGTATTAGGT | 310 |
| HPV83E4-3 | TTATACAAACACTATCACTACTATATC | 311 |
| HPV83E4-4 | ATTCACTATATCCCTTATAAC | 312 |
| HPV83E6-1 | GAATTAATAATAGTAGAAGTGTTGTT | 313 |
| HPV83E6-2 | GGAGTTGTGTATTAGTGGGATT | 314 |
| HPV83E6-3 | CTCAACRACTTCAAACACATATAAC | 315 |
| HPV83E6-4 | TACATAATACCCTACAATAACAAC | 316 |
| HPV83E7-1 | GGTTATATAGTAATAATAGT | 317 |
| HPV83E7-2 | GTAATGAATAAGGTATAGATAGT | 318 |
| HPV83E7-3 | CTATATCCACTACATTCACCAAAAAATC | 319 |
| HPV83E7-4 | TAAATTCCCCAATCCCAATATCTATAC | 320 |
| HPV84E4-1 | ATGTATGYGATTTTGTATTTAGT | 321 |
| HPV84E4-2 | ATTGTTGAAATTGTTGTATAGTTGT | 322 |
| HPV84E4-3 | CAATTATTATTTATCCTTATACTAC | 323 |
| HPV84E4-4 | TAAATATAAAACAAATACACTATC | 324 |
| HPV84E6-1 | GGAAGGYGAAGTGTTGGTTTTTGT | 325 |
| HPV84E6-2 | GGTATAATTTTTTTTATGGGGTGTGT | 326 |
| HPV84E6-3 | TCCTTTTCCTAATAACACAATAACTTAC | 327 |
| HPV84E6-4 | CTATCCAACTATTTTATAAATTAAC | 328 |
| HPV84E7-1 | GTTGTTATTTTATAAAATAGTTGGAT | 329 |
| HPV84E7-2 | GGAAGTGTTGTAATTGTAGGGTAAT | 330 |
| HPV84E7-3 | CTTTCTAAAATCTTCCACTCCACAAAAC | 331 |
| HPV84E7-4 | TAAACACTACTTCCACTATAAACTACTAC | 332 |
| HPV-HM-1 | GATTTDKWDTGWATGAGTAATT | 333 |
| HPV-HM-1A | GATTTDTWVDTGTWATGAGTAATT | 334 |
| HPV-HM-2 | RRYRRKTTAGABGADGA | 335 |
| HPV-HM-2A | RRTRRKTTAGABGADGA | 336 |
| HPV-HM-2B | RRYRRKTTAGAKGADGA | 337 |
| HPV-HM-2C | RRTRRKTTAGAKGADGA | 338 |
| HPV-HM-3 | YDATACCTWCWMAWWHVDCCAT | 339 |
| HPV-HM-3A | YWATACCTWCWMAWWHRDCCAT | 340 |
| HPV-HM-3B | YWATACCTWCWAAWWHRDCCAT | 341 |
| HPV-HM-3C | YWATACCTWCWMAWWMRDCCAT | 342 |
| HPV-HM-3D | YWATACCTWCWMAWWHVDCCAT | 343 |
| HPV-HM-4A | ACHWMAAACCAHCCWHWACAHCC | 344 |
| HPV-HM-4B | ACHWMAAACCAWCCWHWACAHCC | 345 |
| HPV-HM-4C | ACHWHAAACCAHCCWHWACAHCC | 346 |
| HPV-HML-1 | GRKTTDKWDTGTWRKGARTAATT | 347 |
| HPV-HML-2 | RRHRRKTTWGANKWDGA | 348 |
| HPV-HML-3 | YDATACCTWHWHHDWHNDCCAT | 349 |
| HPV-HML-4 | ACHHHAAACCAHCCHHWACAHCC | 350 |
| HPV-Uni-1 | GATGGKGATATGRTDSATRTWGGDTWTGG | 351 |
| HPV-Uni-2 | TAARTATTTWGATTATWTDDRAATG | 352 |
| HPV-Uni-3 | TATTWTAWCCYTAHRCHYWHTAHAACCA | 353 |
| HPV-Uni-4 | AMAAAHAMHTAATTHYHMMAACAWAYACC | 354 |
| HPV-Uni-5 | TAAAAHAYAAAYTAYAMWTCAWAYTCYTC | 355 |
| HR1F | TRTATGGARWDATATTRGAA | 356 |
| HR2F | TRATTTRTTAATWAGGTGT | 357 |
| HR3R | AAYAYAWHWTCWTACAAYAT | 358 |
| HR4R | AATTACTCATWACAHWAHAAATCA | 359 |
| HR5F | GAGGGDAWGGGDTGTWRTGGWTGGTTT | 360 |
| HR6F | GATRWWATATTAGATGATGA | 361 |
| HR7R | TWWACTATYTCTWHHTCTACCTA | 362 |
| HR8R | CYAHAWTCTTTCATTTTAA | 363 |
| LR1F | TATDDWTATATDTARAGKKTDAT | 364 |
| LR2F | GGGWRTGGTDWTRTTDDTRTTA | 365 |
| LR3R | HAYWATWMWWCWAYTYTT | 366 |
| LR4R | TAWWHHHYWAAYAYATTTAA | 367 |
| R1HML-1F | RGGWGKRATTGAAWDDGGTK | 368 |
| R1HML-2F | ATTRAAADTGGWDDDTATA | 369 |
| R1HML-3R | HHHYYTACAHMMHAYACA | 370 |
| R1HML-4R | AWWMWWMHWHWWAHAYMTC | 371 |
| R1HM-1F | GGGWGTRATTGAAADDGGTK | 372 |
| R1HM-2F | ATTRAAAWTGGTDDDTATA | 373 |
| R1HM-3R | HHHYYTACAHTMHACACA | 374 |
| R1HM-4R | AWAMWAMHTHWWATACMTC | 375 |
| R2HML-1F | TTDDWDTGTWRKGARTAATT | 376 |
| R2HML-2F | ATGGWDDWWDDWDWAGGTAT | 377 |
| R2HML-3R | YHAHWWACTTTCATTTTAMH | 378 |
| R2HML-4R | MWAYWACCATWHMYACTAWM | 379 |
| R2HM-1F | ATGGWKDWWTKWGWAGGTAT | 380 |
| R2HM-2F | GGGDTGTWDDGGDTGGTTT | 381 |
| R2HM-3R | ACTAYYTCHHHHTCYACCTA | 382 |
| R2HM-4R | YHAHAWACTTTCATTTTAMH | 383 |
| R2HM-5R | MWAYWACCATAHCCACTATC | 384 |
| R3HML-10R | WMWHMHWWMATWHCCATC | 385 |
| R3HML-11R | AYHWMYMHHWWWHHYYWATAYTT | 386 |
| R3HML-1F | RTTTAARGADDKDTWTGGDDT | 387 |
| R3HML-2F | RRAGTRATARDWKWDKDTGT | 388 |
| R3HML-3F | TRTDDWTATWTDTARWGKTT | 389 |
| R3HML-3R | AAMCWYTAHAWATAWHHAYA | 390 |
| R3HML-4F | TTWTTWWRRWTRTWDAK | 391 |
| R3HML-4R | MTHWAYAWYYWWAAWAA | 392 |
| R3HML-5F | ATGRTDTARTGGGTWTWTGATWAT | 393 |
| R3HML-5R | ATWATCAWAWACCCAYTAHAYCAT | 394 |
| R3HML-6F | GADGADWRTDWDATDGTDT | 395 |
| R3HML-6R | AHACHATHWHAYWHTCHTC | 396 |
| R3HML-7F | GATTGTGKDDKWATGKKWWRRT | 397 |
| R3HML-7R | AYYWMMCATWMHHMCACAATC | 398 |
| R3HML-8F | DRTDTTWAARWADARTTGT | 399 |
| R3HML-8R | ACAAYTHTWYTTWAAHAYH | 400 |
| R3HML-9F | AATKTWDDDAGTTATTTTTGGTT | 401 |
| R3HML-9R | AACCAAAAATAACTHHHWAMATT | 402 |
| R3HM-10F | TTDGTWGAWDKWRATAGTAATGT | 403 |
| R3HM-10R | ACATTACTAYTWMHWTCWACHAA | 404 |
| R3HM-11F | GATTGTGKDRTWATGKKWWRRT | 405 |
| R3HM-11R | AYYWWMMCATWAYHMCACAATC | 406 |
| R3HM-12F | RRKGADGRDGGDRATTGGA | 407 |
| R3HM-12R | TCCAATYHCCHYCHTCMYY | 408 |
| R3HM-13F | GGWRTDTTWAARWAWARTTGT | 409 |
| R3HM-13R | ACAAYTWTWYTTWAAHAYWCC | 410 |
| R3HM-14F | AATTTWDDDAGTTATTTTTGGTT | 411 |
| R3HM-14R | AACCAAAAATAACTHHHWAAATT | 412 |
| R3HM-15F | GATGGDWATKWWDKWWKW | 413 |
| R3HM-15R | WMWWMHWWMATWHCCATC | 414 |
| R3HM-16F | AARTATWRRDDWTWRDKRTARWTRDW | 415 |
| R3HM-16R | WHYAWYTAYMHYWAWHHYYWATAYTT | 416 |
| R3HM-17R | ATAYWYWAMATTHCYATTWWHATC | 417 |
| R3HM-18R | AAAYYTAATYTAMACCAHATM | 418 |
| R3HM-1F | ATTTAAAGADDTDTWTGGDDT | 419 |
| R3HM-2F | ARAGTRATARWWKWWKDTGT | 420 |
| R3HM-3F | TRTDDWTATWTDTARWGTTTA | 421 |
| R3HM-3R | TAAACWYTAHAWATAWHHAYA | 422 |
| R3HM-4F | GTDKWAARADKAGRDWAAT | 423 |
| R3HM-4R | ATTWHYCTMHTYTTWMHAC | 424 |
| R3HM-5F | TTWTTWAAAWTRTGDAGT | 425 |
| R3HM-5R | ACTHCAYAWTTTWAAWAA | 426 |
| R3HM-6F | TTRTATTKKTWTWRAATWGKWWTRTT | 427 |
| R3HM-6R | AAYAWWMCWATTYWAWAMMAATAYAA | 428 |
| R3HM-7F | TARTATRGWWTWDAKKAT | 429 |
| R3HM-7R | ATMHTMWAWWCYATAYTA | 430 |
| R3HM-8F | ATGRTRTARTGGGTWTWTGATWATGA | 431 |
| R3HM-8R | TCATWATCAWAWACCCAYATYAYCAT | 432 |
| R3HM-9F | GATGAWAGTKAWATDGTDTWT | 433 |
| R3HM-9R | AWAHACHATWTMACTWTCATC | 434 |
| R4HM-1F | TWKWRKAWAATTTDKTWTWTGA | 435 |
| R4HM-2F | TTDGATTTDGATTTTWTRRATAT | 436 |
| R4HM-3R | ACTHAHATCHTAATAAWAATA | 437 |
| R4HM-4R | HHHTYYWAWTYAYAWTTC | 438 |
| R4HM-5R | ACATAHAYATCAWAHMWW | 439 |
| R5HM-1F | TTARTGADRDTAWDGTDTATTT | 440 |
| R5HM-2F | ATWRRTATWTWTTATTATGT | 441 |
| R5HM-3R | CYAAAYTTATTWAAATCHAAYAA | 442 |
| R5HM-4R | ACCHAYYTCHAHHCCHAYACAWMCCCA | 443 |
| R5HM-5R | WMHAHTTTCWATATCATCHWA | 444 |
| R6HM-1F | GGDTWTGGDKKWATGGATTTT | 445 |
| R6HM-2F | WKTRTWTGTAARTATTTWGAT | 446 |
| R6HM-3F | GTWAGRTATTWWTDKAATWR | 447 |
| R6HM-3R | YWATTMHAWWAATAYCTWAC | 448 |
| R6HM-4F | TDTTWAGTGGDTTWATDGT | 449 |
| R6HM-4R | ACHATWAAHCCACTWAAHA | 450 |
| R6HM-5F | TARWTDTTTAATAARTTDTATTGG | 451 |
| R6HM-5R | CCAATAHAAYTTATTAAAHAWYTA | 452 |
| R6HM-6F | GGWTATAATAATGGTRTWTGTTGG | 453 |
| R6HM-6R | CCAACAWAYACCATTATTATAWCC | 454 |
| R6HM-7F | GATATWATWWKDARTATWAAT | 455 |
| R6HM-7R | ATTWATAYTHMWWATWATATC | 456 |
| R6HM-8R | TAAAAHAYAAAYTAYAAWTCAWAYTC | 457 |
| R6HM-9R | ATYCATHHHATAWAWATAWAHCAT | 458 |
| HPVB-1F | TTGWADTAAAAATTTDTKDTTWARDG | 459 |
| HPVB-2F | TTTTKWARRTTWATWKKTTAAAAW | 460 |
| HPVB-3F | KKTTKTTGRTADKTWRTDGT | 461 |
| HPVB-4F | ATWKTRTAWARTTGAAAWATAAATTGTA | 462 |
| HPVB-5F | TTGAAAWATAAATVGTARDTTAWATTTTTT | 463 |
| HPVB-6F | TTGRTTRTKTTARTAWATRTTATTRT | 464 |
| HPVB-7F | TTARTAWGGTTTATTRAAWAWTTGDG | 465 |
| HPVB-8F | TATTTKWADATARTTWGGATATTTRTA | 466 |
| HPVB-9F | TRTKWATTATRTTDTTRTTTTKWA | 467 |
| HPVB-10F | RTATARTTGDGTTTGTTTDKDRTT | 468 |
| HPVB-11F | ATTTTWADDTTWRTATADKTTTA | 469 |
| HPVB-12F | ATTTKDTTTTGDWWKDWATTTAAATG | 470 |
| HPVB-13F | KWWARWGGTTKTARTTAAAARTGRTT | 471 |
| HPVB-14F | TTTATWKWAAADWRTGATTTDTTTGT | 472 |
| HPVB-15F | TTKTTKDGTTTKTTTRTARTGTTKD | 473 |
| HPVB-16F | TATARTTTTTWADDWWTTTDGTTTG | 474 |
| HPVB-3R | ACHAYWAMHTAYCAAMAAMM | 475 |
| HPVB-4R | TACAATTTATWTTTCAAYTWTAYAMWAT | 476 |
| HPVB-5R | AAAAAATWTAAHYTACAATTTATWTTTCAA | 477 |
| HPVB-6R | AYAATAAYATWTAYTAAMAYAAYCAA | 478 |
| HPVB-7R | CHCAAWTWTTYAATAAACCWTAYTAA | 479 |
| HPVB-8R | TAYAAATATCCWAAYTATHTWMAAATA | 480 |
| HPVB-9R | TWMAAAAYAAHAAYATAATWMAYA | 481 |
| HPVB-10R | AAYHMHAAACAAACHCAAYTATAY | 482 |
| HPVB-11AR | TAAAMHTATAYWAAHHTWAAAAT | 483 |
| HPVB-11BR | ATHMMHTTACCHAAYCCHAAYAAATT | 484 |
| HPVB-11CR | TATTTTYTTWCAAATAWCHHYWTAAC | 485 |
| HPVB-12BR | ACWTAATMCAAATTAAAYTTAMW | 486 |
| HPVB-12CR | AHTHAAYAAYAWAAAYTAAAAA | 487 |
| HPVB-14R | ACAAAHAAATCAYWHTTTWMWATAAA | 488 |
| HPVB-15R | HMAACAYTAYAAAMAAACHMAAMAA | 489 |
| HPVB-16R | CAAACHAAAWWHHTWAAAAAYTATA | 490 |
| HPVB-17R | AMATAATACAATAAACMTWYAAYMAYAA | 491 |
| HPVB-18R | AAWAMHACMCCHAAATAAATWM | 492 |
| HPV59E6-1 | GATTATATAAATTGTTTGATTTGAGT | 493 |
| HPV59E6-2 | CAATATTGAATATTTTTTTGT | 494 |
| HPV59E6-3 | CTTACATAAAATAAAATACATTTCAAAC | 495 |
| HPV59E6-4 | CTCATATAACRATATCTTAATTTCAAC | 496 |
| HPV59E7-1 | AAATTATGAGGAAGTTGATTTTGTGTGT | 497 |
| HPV59E7-2 | GAGTTAATTATTTTTTGTTATTAGT | 498 |
| HPV59E7-3 | TATATCCATAAACAACTACTATAAAAC | 499 |
| HPV59E7-4 | ATCTATACCTTCCRAATCRACCATTAC | 500 |
| HPV59E4-1 | GTTATTGATTGTTATGATTTTATGTGT | 501 |
| HPV59E4-2 | GTATTTATTGTTGGATTTTTTGAGT | 502 |
| HPV59E4-3 | CTAAATTATCACAATAATCCACTAAC | 503 |
| HPV59E4-4 | TAATATTACTACAAAAAATATAC | 504 |
| HPV59E5-1 | GTTTGTGTGTGTGTTGTAATGTTT | 505 |
| HPV59E5-2 | GTTTTTGTAATTTGTTTATATGTGTGT | 506 |
| HPV59E5-3 | TTATTATATAAACAATATTACATAAAC | 507 |
| HPV59E5-4 | AAAATATACTATACAATACAATAC | 508 |
| HPV68E6-1 | TTATTGTAGAAGGTAATTATAAYGGAT | 509 |
| HPV68E6-2 | GGGAYGGGGTATTATTAGTTGTATGT | 510 |
| HPV68E6-3 | CTCAATAATTTCAAACAACACATAC | 511 |
| HPV68E6-4 | AAATCTTCRTTTTAAATTTAAATAC | 512 |
| HPV68E7-1 | AATAGYGTTATATAATTTAGTGTAT | 513 |
| HPV68E7-2 | GTAGTAGAAGYGTYGYGGGAGAATT | 514 |
| HPV68E7-3 | ATCCCCATCTATACCTTCACAATTAAC | 515 |
| HPV68E7-4 | TTATTTATCTACTATTACTTATAC | 516 |

[0175] The present inventors have found that optimal primers for the detection of High-risk HPV are primers SEQ ID NO: 333 to SEQ ID NO: 350, these primers are top strand primers. These primers work using 1 and 4 for the 1st round PCR and 2 and 3 for the second round PCR.

[0176] The present inventors have found that optimal primers for the detection of all ano-genital HPV are the following bottom strand primers SEQ ID NO: 462 with SEQ ID NO: 479 1st round, SEQ ID NO: 463 and SEQ ID NO: 478 2nd round or SEQ ID NO: 470 and SEQ ID NO: 485 1st round, SEQ ID NO: 470 and SEQ ID NO: 486 2nd round.

[0177] Viral primers sequences have been generated using multiple alignments to different HPV types to generate primers for the detection of Universal HPV (denoted Uni), High risk types (denoted HR), medium risk types (denoted HM), Low risk types (denoted LR). And various combinations of such HPV types. The combinations are denoted High and Medium risk HPV types (HM), High, Medium and Low risk HPV types (HML).

[0178] What constitutes high, medium and low risk types of HPV varies depending on geographic location and on the ethnic lineage of the individuals under test. The FDA approved Hybrid Capture 2 test utilizes thirteen viral types, HPV16, 18, 31, 33, 35, 39, 45, 51, 52, 56, 58, 59 and 68, which we collectively term high-medium risk. For the purposes of the present invention, a subgroup of these is referred to as high risk, namely HPV 16, 18, 45 and 58, and the other subgroup is referred to as medium risk, 31, 33, 35, 39, 51, 52, 58, 59 and 68. The low risk types are HPV6, 11, 26, 30, 40, 42, 43, 44, 53, 54, 55, 57, 66, 73, 82, 83, and 84. The primers were designed for individual HPV types based on the E6, E7, E4, E5 genes of the above HPV virus types.

[0179] An example of the designations used in Table 1, such as HPV11-E4-1 indicates primers targeting the top strand of HPV11 using the E4 gene region. The −1 indicates the specific primer number.

[0180] Since more than one base needs to be used at a particular position in order to overcome the degeneracy issue, the following symbols designate the base additions; N=A, G, T or C, D=A, G or T, H=A, T or C, B=G, T or C, V=G, A or C, K=G or T, S=C or G; Y=T or C, R=A or G, M=A or C and W=A or T.

### HPV Assay

[0181] The HPV detection method according to the present invention (namely genomic complexity-reduction followed by amplification technologies), can be combined with other assays of quite different types for the evaluation of changed cellular status within a cell population, for risk assessment underpinned by deranged transcriptomic, proteomic, metabolite or methylomic networks within infected cells, for monitoring the progression of an infection and for evaluating a therapeutic regimen such as antiviral therapy.

[0182] For example, a molecular assay measuring HPV specific nucleic acid molecules can be combined with:
[0183] assays using pattern recognition and high throughput robotic imaging technology such as the Multi-Epitope-Ligand-Kartographie (MELK) system for automated quantitation of fluorescent signals in tissue sections,
[0184] assays using light, confocal, transmission or electron microscopic analyses for Fluorescent In Situ Hybridizations (FISH), cytological or histological analyses that detect gross levels of chromosomal disturbance within cells, such as aneuploidy, or abnormal organelles (in terms of number, type or morphological appearance),
[0185] assays using nucleic acid or polypeptide aptamers; Spiegelmers, (mirror image high-affinity oligonucleotide ligands); multicoloured nanocrystals (quantum dot bioconjugates), for ultrasensitive non-isotopic detection of molecules, or biomarkers for cell surface or internal components; combinatorial chemistry approaches involving Systematic Evolution of Ligands by Exponential Enrichment (SELEX) and high affinity aptamer ligands targeted to different cellular components,
[0186] assays using laser-capture of cells or immunomagnetic cell enrichment technologies, or microsphere-based technologies interfaced with flow cytometry, or optical barcoding of colloidal suspensions containing various nucleic acid or peptide/protein moieties,
[0187] assays using single cell comparative genomic hybridization aimed at detecting gross genomic imbalances such as duplications, deficiencies, transpositions, rearrangements and their associated in situ technologies,
[0188] assays reporting on transcriptomic modulations, such as robogenomic microarray technologies including Serial Analysis of Gene Expression (SAGE), Total Gene Expression Analyses, (TOGA), randomly ordered addressable high density fiber-optic sensor arrays, Massively Parallel Signature Sequencing (MPSS) on microbeads,
[0189] assays reporting on proteomic modulations using various technologies including cellular analyses via protein microarrays, Matrix Assisted Laser Desorption Ionization-Time of Flight (MALDI-TOF) methods, Fourier Transformed Ion Cyclotron Resonance Mass Spectrometry, (FTICR), LC MS-MS and Rapid Evaporative cooling Mass Spectrometry, (RapEvap MS),
[0190] assays using Multi Photon Detection (MPD) technologies where the detection levels approach zeptomole (10⁻²¹) sensitivity,
[0191] assays using methylomic technologies to interrogate the methylome of cells from clinical samples to determine the position of a the cell population along a given trajectory from normalcy to cervical cancer; preferably to determine the altered methylation signature of genomic loci in cells which are affected by viral infection, or immune cells which have been recruited to the site of infection or inflammation.

[0192] Some of the above technologies have been previously evaluated (2001, Miklos and Maleszka, Proteomics, 1, 30-41).

### Data Collection, Integration and Management Systems

[0193] The data collection and the data management systems for the material associated with the present invention can be combined with clinical patient data and analysed using specialized algorithmic methods. Robotic platform management and data collection can be automatically stored and the collected data combined with an informatics infrastructure and software tools that interface with gene ontologies, (GO), with disease ontologies as exemplified by the National Library of Medicine's Medical Subject Headings (MeSH) thesaurus, the Online Mendelian Inheritance in Man, (OMIM), or with knowledge databases such the Human Genome Mutation Database (HGMD) or PubMed. Software pipelines that interface with the latest human genome assemblies and provide access to, and downloading of, information from sources such as Genbank and RefSeq, can be combined with assays reporting on the genomic status of cells that are HPV infected, or that have been influenced by cells owing to HPV presence elsewhere in the body.

[0194] The database infrastructure integrating HPV data with clinical and relevant bioinformatics data can, for example, utilize a loosely-coupled modular architecture which facilitates better software engineering and database management. A relational database management system (RDBMS), (such as Postgresq1 version 7.3) is open source and robust, and serves as an example of part of an integrated system to evaluate and better predict clinical outcomes in the HPV arena. Additional features involving web based Graphical User Interfaces (GUI) would allow for integrated cytological and histological analysis to be combined with molecular HPV data together with therapeutic and pharmaceutical data available in very diverse formats. The integration of enhanced digital technology for image analysis, remote image sharing by pathologists and automated visualization systems is envisaged as an integrated part of an automated molecular kit platform.

### Cell Sampling

[0195] HPV detection protocols can be implemented on samples from any portion of the body, including samples from pre-blastocyst stages, embryonic tissues, perinatal material, cadavers or forensic sources. Preferably they are from cervicovaginal areas such as the cervix and vagina but can also be from cutaneous sources. Preferably they are from the cervical transformation zone. The samples can be collected using the CervexBrush, Therapak Corp, Irwindale, Calif., USA; Digene Cervical sampler cervical brush, Digene Corp. Gaitherburg, Md., USA; a plastic spatula/brush combination, Cooper Instruments, Hollywood, Fla., USA; or using dacron swabs or any suitable material for obtaining samples from the ano-genital area or by any standard biopsy procedure such as a needle biopsy. The samples can be placed in various media, such as PreserveCyte, Cytyc Corp. MA, USA or AutoCyte PREP from TriPath Imaging Burlington, N.C., USA. Preferably, initial tests are conducted on Liquid based Cytology, but planar platforms such as paraffin sections and slides are also suitable.

### Kits

[0196] The present invention can be implemented in the form of various kits, or combination of kits and instantiated in terms of manual, semi automated or fully robotic platforms. In a preferred form, the MethyEasy™ or HighThroughput MethylEasy™ kits (Human Genetic Signatures Pty Ltd, Australia) allow conversion of nucleic acids in 96 or 384 plates using a robotic platform such as EpMotion.

### Human Papilloma Virus

[0197] Mature human papilloma virus DNA is encapsulated within an icosahedral capsid coat consisting of two virally encoded proteins. The double stranded circular DNA genome is 7904 base pairs in length for HPV16, but among the common medium-risk types varies from 7808 base pairs of HPV51 to 7942 base pairs of HPV52. The regions of the viral genome are presented below in the order in which they occur on the circular molecule. The virus has a non-coding region termed URR followed by number of coding regions denoted, E6, E7, E1, E2, E4, E5, L2 and L1. Some viral types may lack a functional E5 region. The E4 region produces multiple protein products which cause disturbances of the cytoplasmic keratin network, leading to a cytoplasmic “halo effect” termed koilocytosis. The different HPV types are epitheliotopic and after infection can lead to koilocytosis, dyskeratosis, multinucleation, abnormalities such as nuclear enlargement and low grade squamous intraepithelial lesions (LSILs), all of these changes applying only to the cervix. Viral infection and chromosome abnormalities can be correlated in cervical carcinoma, but the multiparametric changes observed in neoplastic lesions, and their association with viral infection, viral gene expression, viral integration, cellular differentiation and genomic abnormalities is very poorly understood (1998, Southern, S. A. et al., Sex Transm Inf., 74, 101-109). It is for this reason that detection of different viral types and their differing effects in different genetic backgrounds is of such critical importance.

[0198] Additionally, although the designation of HPV types into cutaneous and mucosal categories and into high-, medium- and low-risk categories is accepted in the prior art, these categories exhibit some fraying and overlap even between the cutaneous and mucosal subcategories of HPV. For example HPV7 has been associated with cutaneous waits as well as oral lesions. HPV26 has been isolated in the context of generalized verrucosis as well as anogenital lesions. Furthermore, although HPV6 and HPV11 have been classified as low-risk types, they have been isolated from Buschke-Lowenstein tumors as well as laryngeal and vulval carcinomas and condylomata acuminata, (1986, Boshart, M. et al., J. Virology, 58, 963-966; 1992, Rubben, A., et al., J Gen Virol., 73, 3147-3153).

[0199] Viral integration into the host genome leads to linearization between the E1 and L1 gene regions with retention of the URR, E6 and E7 regions, but with deletion of gene regions such as E1, L1 and L2 and inactivation or deletion of E2. The E6 and E7 regions are generally retained in cervical carcinoma whereas E2 protein expression is absent. E2 damage has been associated with poor prognosis and shortened survival.

### Patient Samples

[0200] Cell samples were collected by family physicians from the surface of the uterine cervix using a cervix sampling device supplied by Cytyc Corporation USA. The patients had given consent for the sample to be taken as part of a routine cancer screening program or as a monitoring test for previous cervical disease. The physicians transferred the cells from the collection device to a methanol/water solution for preservation of the cells and transport to the laboratory for testing. The cell sample was assessed for changes due to pre-cancer or viral infections using routine morphological preparations. A separate aliquot of the cell sample was used for DNA testing as outlined in this specification.

### Extraction of DNA

[0201] Viral DNA can be obtained from any suitable source. Examples include, but not limited to, cell cultures, broth cultures, environmental samples, clinical samples, bodily fluids, liquid samples, solid samples such as tissue. Viral DNA from samples can be obtained by standard procedures. An example of a suitable extraction is as follows. The sample of interest is placed in 400 μl of 7 M Guanidinium hydrochloride, 5 mM EDTA, 100 mMTris/HCl pH6.4, 1% Triton-X-100, 50 mM Proteinase K (Sigma), 100 μg/ml yeast tRNA. The sample is thoroughly homogenised with disposable 1.5 ml pestle and left for 48 hours at 60° C. After incubation the sample is subjected to five freeze/thaw cycles of dry ice for 5 minutes/95° C. for 5 minutes. The sample is then vortexed and spun in a microfuge for 2 minutes to pellet the cell debris. The supernatant is removed into a clean tube, diluted to reduce the salt concentration then phenol:chloroform extracted, ethanol precipitated and resuspended in 50 μl of 10 mM Tris/0.1 mM EDTA.

[0202] Surprisingly, it has been found by the present inventors that there is no need to separate the viral DNA from other sources of nucleic acids. The treatment step can be used for a vast mixture of different DNA types and yet a viral-specific nucleic acid can be still identified by the present invention. It is estimated that the limits of detection in a complex DNA mixtures are that of the limits of standard PCR detection which can be down to a single copy of a target viral nucleic acid molecule.

### Bisulphite Treatment

[0203] An exemplary protocol for effective bisulphite treatment of nucleic acid is set out below. The protocol results in retaining substantially all DNA treated. This method is also referred to herein as the Human Genetic Signatures (HGS) method. It will be appreciated that the volumes or amounts of sample or reagents can be varied.

[0204] Preferred method for bisulphite treatment can be found in U.S. Ser. No. 10/428,310 or PCT/AU2004/000549 incorporated herein by reference.

[0205] To 2 μg of DNA, which can be pre-digested with suitable restriction enzymes if so desired, 2 μl ( 1/10 volume) of 3 M NaOH (6 g in 50 ml water, freshly made) was added in a final volume of 20 μl. This step denatures the double stranded DNA molecules into a single stranded form, since the bisulphite reagent preferably reacts with single stranded molecules. The mixture was incubated at 37° C. for 15 minutes. Incubation at temperatures above room temperature can be used to improve the efficiency of denaturation.

[0206] After the incubation, 208 μl 2 M Sodium Metabisulphite (7.6 g in 20 ml water with 416 ml 10 N NaOH; BDH AnalaR #10356.4D; freshly made) and 12 μl of 10 mM Quinol (0.055 g in 50 ml water, BDH AnaIR #103122E; freshly made) were added in succession. Quinol is a reducing agent and helps to reduce oxidation of the reagents. Other reducing agents can also be used, for example, dithiothreitol (DTT), mercaptoethanol, quinone (hydroquinone), or other suitable reducing agents. The sample was overlaid with 200 μl of mineral oil. The overlaying of mineral oil prevents evaporation and oxidation of the reagents but is not essential. The sample was then incubated overnight at 55° C. Alternatively the samples can be cycled in a thermal cycler as follows: incubate for about 4 hours or overnight as follows: Step 1, 55° C./2 hr cycled in PCR machine; Step 2, 95° C./2 min. Step 1 can be performed at any temperature from about 37° C. to about 90° C. and can vary in length from 5 minutes to 8 hours. Step 2 can be performed at any temperature from about 70° C. to about 99° C. and can vary in length from about 1 second to 60 minutes, or longer.

[0207] After the treatment with Sodium Metabisulphite, the oil was removed, and 1 μl tRNA (20 mg/ml) or 2 μl glycogen were added if the DNA concentration was low. These additives are optional and can be used to improve the yield of DNA obtained by co-precitpitating with the target DNA especially when the DNA is present at low concentrations. The use of additives as carrier for more efficient precipitation of nucleic acids is generally desired when the amount nucleic acid is <0.5 μg.

[0208] An isopropanol cleanup treatment was performed as follows: 800 μl of water were added to the sample, mixed and then 1 ml isopropanol was added. The water or buffer reduces the concentration of the bisulphite salt in the reaction vessel to a level at which the salt will not precipitate along with the target nucleic acid of interest. The dilution is generally about ¼ to 1/1000 so long as the salt concentration is diluted below a desired range, as disclosed herein.

[0209] The sample was mixed again and left at 4° C. for a minimum of 5 minutes. The sample was spun in a microfuge for 10-15 minutes and the pellet was washed 2× with 70% ETOH, vortexing each time. This washing treatment removes any residual salts that precipitated with the nucleic acids.

[0210] The pellet was allowed to dry and then resuspended in a suitable volume of T/E (10 mM Tris/0.1 mM EDTA) pH 7.0-12.5 such as 50 μl. Buffer at pH 10.5 has been found to be particularly effective. The sample was incubated at 37° C. to 95° C. for 1 min to 96 hr, as needed to suspend the nucleic acids.

[0211] Another example of bisulfite treatment can be found in WO 2005021778 (incorporated herein by reference) which provides methods and materials for conversion of cytosine to uracil. In some embodiments, a nucleic acid, such as gDNA, is reacted with bisulfite and a polyamine catalyst, such as a triamine or tetra-amine: Optionally, the bisulfite comprises magnesium bisulfite. In other embodiments, a nucleic acid is reacted with magnesium bisulfite, optionally in the presence of a polyamine catalyst and/or a quaternary amine catalyst. Also provided are kits that can be used to carry out methods of the invention. It will be appreciated that these methods would also be suitable for the present invention in the treating step.

### Amplification

[0212] PCR amplifications were performed in 25 μl reaction mixtures containing 2 μl of bisulphite-treated genomic DNA, using the Promega PCR master mix, 6 ng/μl of each of the primers. Strand-specific nested primers are used for amplification. 1st round PCR amplifications were carried out using PCR primers 1 and 4 (see below). Following 1st round amplification, 1 μl of the amplified material was transferred to 2nd round PCR premixes containing PCR primers 2 and 3 and amplified as previously described. Samples of PCR products were amplified in a ThermoHybaid PX2 thermal cycler under the conditions: 1 cycle of 95° C. for 4 minutes, followed by 30 cycles of 95° C. for 1 minute, 50° C. for 2 minutes and 72° C. for 2 minutes; 1 cycle of 72° C. for 10 minutes.

[0213] A representation of the fully nested PCR approach is shown below:

[chemical structure]

### Multiplex Amplification

[0214] One μl of bisulphite treated DNA is added to the following components in a 25 μl 20 reaction volume, ×1 Qiagen multiplex master mix, 5-100 ng of each 1st round INA or oligonucleotide primer 1.5-4.0 mM MgSO₄, 400 μM of each dNTP and 0.5-2 units of the polymerase mixture. The components are then cycled in a hot lid thermal cycler as follows. Typically there can be up to 200 individual primer sequences in each amplification reaction:

[0215] Step 1; 94° C. 15 minute 1 cycle

[0216] Step 2; 94° C. 1 minute; 50° C. 3 minutes 35 cycles; 68° C. 3 minutes.

[0217] Step 3 68° C. 10 minutes 1 cycle

[0218] A second round amplification is then performed on a 1 μl aliquot of the first round amplification that is transferred to a second round reaction tube containing the enzyme reaction mix and appropriate second round primers. Cycling is then performed as above.

### HGS ‘Complexity-Reduced’ Primers and Probes

[0219] Any suitable PCR primers or probes can be used for the present invention. A primer or probe typically has a complementary sequence to a sequence which will be amplified. Primers or probes are typically oligonucleotides but can be nucleotide analogues such as INAs. Primers to the ‘top’ and ‘bottom’ strands will differ in sequence.

### Probes and Primers

[0220] A probe or primer may be any suitable nucleic acid molecule or nucleic acid analogue. Examples include, but not limited to, DNA, RNA, locked nucleic acid (LNA), peptide nucleic acid (PNA), MNA, altritol nucleic acid (ANA), hexitol nucleic acid (HNA), intercalating nucleic acid (INA), cyclohexanyl nucleic acid (CNA) and mixtures thereof and hybrids thereof, as well as phosphorous atom modifications thereof, such as but not limited to phosphorothioates, methyl phospholates, phosphoramidites, phosphorodithiates, phosphoroselenoates, phosphotriesters and phosphoboranoates. Non-naturally occurring nucleotides include, but not limited to the nucleotides comprised within DNA, RNA, PNA, INA, HNA, MNA, ANA, LNA, CNA, CeNA, TNA, (2′-NH)-TNA, (3′-NH)-TNA, α-L-Ribo-LNA, α-L-Xylo-LNA, β-D-Xylo-LNA, α-D-Ribo-LNA, [3.2.1]-LNA, Bicyclo-DNA, 6-Amino-Bicyclo-DNA, 5-epi-Bicyclo-DNA, α-Bicyclo-DNA, Tricyclo-DNA, Bicyclo[4.3.0]-DNA, Bicyclo[3.2.1]-DNA, Bicyclo[4.3.0]amide-DNA, β-D-Ribopyranosyl-NA, α-L-Lyxopyranosyl-NA, 2′-R-RNA, α-L-RNA or α-D-RNA, β-D-RNA. In addition non-phosphorous containing compounds may be used for linking to nucleotides such as but not limited to methyliminomethyl, formacetate, thioformacetate and linking groups comprising amides. In particular nucleic acids and nucleic acid analogues may comprise one or more intercalator pseudonucleotides.

[0221] The probes or primers can be DNA or DNA oligonucleotides containing one or more internal IPNs forming INA.

### Detection Methods

[0222] Numerous possible detection systems exist to determine the status of the desired sample. It will be appreciated that any known system or method for detecting nucleic acid molecules could be used for the present invention. Detection systems include, but not limited to:
[0223] I. Hybridization of appropriately labelled DNA to a micro-array type device which could select for 10->200,000 individual components. The arrays could be composed of either INAs, PNAs or nucleotide or modified nucleotides arrays onto any suitable solid surface such as glass, plastic, mica, nylon, bead, magnetic bead, fluorescent bead or membrane;
[0224] II. Southern blot type detection systems;
[0225] III. Standard PCR detection systems such as agarose gel, fluorescent read outs such as Genescan analysis. Sandwich hybridisation assays, DNA staining reagents such as ethidium bromide, Syber green, antibody detection, ELISA plate reader type devices, fluorimeter devices;
[0226] IV. Real-Time PCR quantitation of specific or multiple genomic amplified fragments or any variation on that
[0227] V. Any of the detection systems outlined in the WO 2004/065625 such as fluorescent beads, enzyme conjugates, radioactive beads and the like;
[0228] VI. Any other detection system utilizing an amplification step such as ligase chain reaction or Isothermal DNA amplification technologies such as Strand Displacement Amplification (SDA).
[0229] VII. Multi-photon detection systems.
[0230] VIII. Electrophoresis and visualisation in gels.
[0231] IX. Any detection platform used or could be used to detect nucleic acid.

### Electrophoresis

[0232] Electrophoresis of samples was performed according to the E-gel system user guide (www.invitrogen.doc).

### Intercalating Nucleic Acids

[0233] Intercalating nucleic acids (INA) are non-naturally occurring polynucleotides which can hybridize to nucleic acids (DNA and RNA) with sequence specificity. INA are candidates as alternatives/substitutes to nucleic acid probes and primers in probe-, or primer-based, hybridization assays because they exhibit several desirable properties. INAs are polymers which hybridize to nucleic acids to form hybrids which are more thermodynamically stable than a corresponding naturally occurring nucleic acid/nucleic acid complex. They are not substrates for the enzymes which are known to degrade peptides or nucleic acids. Therefore, INAs should be more stable in biological samples, as well as having a longer shelf-life than naturally occurring nucleic acid fragments. Unlike nucleic acid hybridization which is very dependent on ionic strength, the hybridization of an INA with a nucleic acid is fairly independent of ionic strength and is favoured at low ionic strength under conditions which strongly disfavour the hybridization of naturally occurring nucleic acid to nucleic acid. The binding strength of INA is dependent on the number of intercalating groups engineered into the molecule as well as the usual interactions from hydrogen bonding between bases stacked in a specific fashion in a double stranded structure. Sequence discrimination is more efficient for INA recognizing DNA than for DNA recognizing DNA.

[0234] Preferably, the INA is the phosphoramidite of (S)-1-O-(4,4′-dimethoxytriphenylmethyl)-3-O-(1-pyrenylmethyl)-glycerol.

[0235] INAs are synthesized by adaptation of standard oligonucleotide synthesis procedures in a format which is commercially available. Full definition of INAs and their synthesis can be found in WO 03/051901, WO 03/052132, WO 03/052133 and WO 03/052134 (Unest A/S) incorporated herein by reference.

[0236] There are indeed many differences between INA probes and primers and standard nucleic acid probes and primers. These differences can be conveniently broken down into biological, structural, and physico-chemical differences. As discussed above and below, these biological, structural, and physico-chemical differences may lead to unpredictable results when attempting to use INA probes and primers in applications were nucleic acids have typically been employed. This non-equivalency of differing compositions is often observed in the chemical arts.

[0237] With regard to biological differences, nucleic acids are biological materials that play a central role in the life of living species as agents of genetic transmission and expression. Their in vivo properties are fairly well understood. INA, however, is a recently developed totally artificial molecule, conceived in the minds of chemists and made using synthetic organic chemistry. It has no known biological function.

[0238] Structurally, INAs also differ dramatically from nucleic acids. Although both can employ common nucleobases (A, C, G, T, and U), the composition of these molecules is structurally diverse. The backbones of RNA, DNA and INA are composed of repeating phosphodiester ribose and 2-deoxyribose units. INA differs from DNA or RNA in having one or more large flat molecules attached via a linker molecule(s) to the polymer. The flat molecules intercalate between bases in the complementary DNA stand opposite the INA in a double stranded structure.

[0239] The physico/chemical differences between INA and DNA or RNA are also substantial. INA binds to complementary DNA more rapidly than nucleic acid probes or primers bind to the same target sequence. Unlike DNA or RNA fragments, INA bind poorly to RNA unless the intercalating groups are located in terminal positions. Because of the strong interactions between the intercalating groups and bases on the complementary DNA strand, the stability of the INA/DNA complex is higher than that of an analogous DNA/DNA or RNA/DNA complex.

[0240] Unlike other nucleic acids such as DNA or RNA fragments or PNA, INAs do not exhibit self aggregation or binding properties.

[0241] In summary, as INAs hybridize to nucleic acids with sequence specificity, INAs are useful candidates for developing probe-, or primer-based assays and are particularly adapted for kits and screening assays. INA probes and primers, however, are not the equivalent of nucleic acid probes and primers. Consequently, any method, kits or compositions which could improve the specificity, sensitivity and reliability of probe-, or primer-based assays would be useful in the detection, analysis and quantitation of DNA containing samples. INAs have the necessary properties for this purpose.

### EXAMPLES

[0242] To reiterate the foundations on which we have based our bioinformatic analyses in silico, the standard HPV type utilized for reference purposes is HPV16 of the Family Papovaviridae, Genus Papillomavirus, originally designated as such by the International Committee on Taxonomy of Viruses, ICTV, (1993, Van Rast, M. A., et al., Papillomavirus Rep, 4, 61-65; see also, 1998 Southern, S. A. and Herrington, C. S. Sex. Transm. Inf. 74, 101-109), although taxonomic upgrades to the Papillomaviridae are sometimes used interchangeably in the prior art. To avoid ambiguity, we use the fully sequenced 7904 base pair genome of HPV16 as a standard comparator (National Center for Biotechnology Information, NCBI locus NC_{—}001526; version NC_{—}001526.1; GI:9627100; references, Medline, 91162763 and 85246220; PubMed 1848319 and 2990099).

[0243] In addition, we used the fully sequenced genomes of the so called high-risk HPV types 16, 18, 45 and 56 with NCBI accession numbers of NC-001526, NC-001357, NC-001590 and NC-001594 respectively.

[0244] We used the fully sequenced genomes of the so called medium risk HPV types 31, 33, 35, 39, 51, 52, 58 and 66 with NCBI accession numbers NC-001527, NC-001528, NC-001529, NC-001535, NC-001533, NC-001592, NC-001443 and NC-001695 respectively.

[0245] We used the fully sequenced genomes of the so called low risk HPV types 6, 11, 30, 42, 43, 44, 53, 54 and 55 with NCBI accession numbers of NC-000904, NC-001525, NC-001585, NC-001534, NC-005349, NC-001689, NC-001593, NC-001676 and NC-001692 respectively.

[0246] As we have demonstrated, the detection of human papilloma viral DNA in various clinical samples via conventional DNA tests is hampered by a number of technical, methodological and clinical problems. The present invention provides a solution to many of the difficulties encountered in the prior art, since the bisulphite conversion of HPV DNA reduces the complexity of the HPV derivative sequence pool. This complexity-reduction allows for a more efficient initial screening of the different HPV types within a sample and hence for a more appropriate and accurate interface with the clinical data.

[0247] FIGS. 1 to 4 depict the in silico groundwork that allowed for the optimum design of primers and probes for the detection of portions of what was the original HPV genome, but is now its converted derivative. FIGS. 5 to 10 show PCR amplified nucleic acid products generated from different regions of different HPV types, of different oncogenic risk types, using ‘universal’ primers or combinations of primers in multiplex PCR reactions using clinical samples from 16 different patients. FIG. 11 tabulates these results. FIG. 12 illustrates the consequences of primer degeneracy on the outcome of PCR reactions and the advantages of the current invention. FIGS. 13 and 14 illustrate the normal, derivative and genomically simplified sequences of the top and bottom strands of HPV16. FIGS. 15 and 16 illustrate the “helicopter” view of where the preferred primers are to be found on the top and bottom strands of the HPV sequence. FIG. 17 shows a section of a clinical sample revealing cancerous cells of the cervix surrounded by normal stromal cells. FIGS. 18 and 19 illustrate the two stages of typing clinical samples, with the former figure revealing that a high-medium risk HPV is present in a Liquid Based Cytology sample, and the latter revealing the exact viral type in the same sample. FIG. 20 shows the results of identifying high-medium risk HPV types (HPV 16, 18, 31, 33, 35, 39, 45, 51, 52, 56, 58, 59 and 68) from archival paraffin sections, rather than liquid based samples. FIG. 21 demonstrates that HPV typing can be done not just by using primers made to the genomically simplified top strand, but to the genomically simplified bottom strand as well. Furthermore, the invention is also taught in Tables 1 through 4, where the sequences of the primers; some examples of the expected amplicon sizes; and the results of HPV typing in hundreds of clinical samples, are compared to the current FDA approved Hybrid Capture 2 methodology applied to the same samples.

[0248] FIGS. 23 to 46 show natural (A), derivative (B) and simplified (C) HPV nucleic acid sequences for top and bottom strands of high-risk HPV18, 45 or 56 and medium risk HPV 31, 33, 35, 39, 51, 52, 58, 59 and 68. Invention relates to B and C sequences.

[0249] FIG. 1 shows the multiple DNA alignment of the same 8 base pair genomic region of individual viral types HPV 33, 35, 39, 52, 58, 16, 18, 45 and 56, before and after complexity-reduction using bisulphite treatment. The region under consideration is that within the L1 gene at positions 6600-6607, (anchored using the standard coordinates of HPV16). The different HPV types vary in their nucleotide sequence at positions 6590, 6593 and 6956, having either a C or a T at these positions, (bolded). However after chemical conversion of HPV DNA, all of these HPV types now have an identical DNA sequence between ‘top’ strand positions 6590 and 6597, (namely TATAATA) SEQ ID NO: 518), and hence a single primer or probe can be synthesized, (that together with a nearby appropriate primer), will amplify this region from a primer pair. The ability to employ unique primers instead of degenerate ones is the key to increases in accuracy and to the generation of specific amplification products, an issue of major importance when viral types are being used for diagnostic purposes in the clinic and for subsequent treatment regimens. The use of a second nearby sequence allows amplification of all the viral types given in this illustration, (namely HPV types, 33, 35, 39, 52, 58, 16, 18, 45 and 56), using one set of non degenerate primers.

[0250] It should be stressed that a major failing of the prior art in the HPV PCR area has been the inability to circumvent the use of degenerate primers, which by necessity, contain a mixture of bases at those positions in which a base is different between different viral types. Thus, to amplify the sequence of the non-bisulphite treated sample, the PCR primers in FIG. 1 would have to be of the sequence YCAYAAYA (SEQ ID NO: 701) (where Y=C or T at that position). In contrast, with a bisulphite treated HPV derivative, the primer TTATAATA (SEQ ID NO: 518) becomes an identical match for all viral types. The main problem with the degenerate primer approach is that in the conventional 4-base genome, the primers very quickly become so degenerate that either they do not produce an amplified product or produce multiple products or smears due to non-specific hybridisation to non-target DNA sequences.

[0251] FIG. 2 shows DNA alignment of a 17 base pair genomic region of individual HPV types 6, 11, 43, 44, 53, 55, 30, 31, 39, 51, 52, 16, 18 and 45, and the complexity-reduction following bisulphite treatment of the DNA sample. This region is also in the L1 gene but is at positions 6581-6597. The different HPV types vary in their nucleotide sequence at positions 6581, 6584, 6590, 6593 and 6596 (as defined by HPV16 positional numbering). The consensus primer before bisulphite treatment is NGCNCAGGGHCAHAAYA (SEQ ID NO: 702) (where in standard notation; N=G, A, T or C; and H=A, T or C; and D=G, A, or T; and Y=A or C). The consensus primer after bisulphite treatment is DGTDTAGGGYTATAATA (SEQ ID NO: 703). As can be seen, the primer derived from the bisulphite treated derivative is much less degenerate than the primer based on the non-converted genomic sequence. In the case of the non-converted consensus primer there are a total of 288 primer combinations, while in the converted derivative only 18 primer combinations are required. In addition, the primer from the non-converted sequence has up to 4 base degeneracy at each site, while the converted derivative only has a maximum of 3 base degeneracy at any one site.

[0252] Conventional PCR primers are generally 20 to 30 nucleotides in length on complementary strands and at either end of the region to be amplified. Primers less than this generally have a low melting temperature especially if the primers are degenerate, which make PCR amplification problematic. Using the bisulphite complexity-reduction technique described herein, it is possible to locate regions of almost 100% sequence similarity between individual HPV types that ensure reliable amplification without the need to include such a large number of mismatched bases in the PCR primer as is the case for conventional degenerate primer sets.

[0253] FIG. 3 shows DNA alignment of a 20 base pair region on the ‘top’ strand in the L1 region of HPV types (HPV 6, 43, 44, 54, 55, 30, 33, 58, 18 and 45) from positions 6225 to 6243. This region exhibits a sequence similarity of 75% before bisulphite treatment and over 90% sequence similarity after bisulphite treatment. The consensus primer of GATGGYGAYATGGTDGAYAY (SEQ ID NO: 704) has 48 possible primer combinations, but after complexity-reduction the HGS complexity-reduced consensus primer, GATGGTGATATGGTDGATAT (SEQ ID NO: 705), needs only 3 primer combinations. Even further improvements can be implemented by using Intercalating Nucleic Acids as primers and probes in hybridization reactions. These improvements are described in FIG. 4.

[0254] FIG. 4 shows the DNA alignment of the same 20 base pair region of individual HPV types as in FIG. 3 (6, 43, 44, 54, 55, 30, 33, 58, 18 and 45) from positions 6225 to 6243 as well as the sequence of high affinity INA primers and probes that can be used more effectively in hybridization reactions than standard oligonucleotides. Since INA primers can be far shorter in length than standard oligonucleotides, the first 14 bases of the above 20 base sequence can be constructed in INA form. Prior to bisulphite treatment, a 14 base INA with appropriately placed IPNs would have 85% sequence similarity over 14 bases, a figure which would rise to 100% sequence similarity over the same 14 base pair region after bisulphite treatment. This HGS complexity-reduced primer or probe, (GATGGTGATATGGT) (SEQ ID NO: 706), has no degeneracy whatsoever.

[0255] The significant advantages of INAs over the standard oligonucleotide primers and probes are that first, INAs can be made much shorter than conventional oligonucleotides due to the very high affinity of INA for complementary DNA. In fact, it has been shown that INAs as small as 12-14 bases can produce reliable signals in a PCR amplification reaction. Furthermore, any loss of specificity in the first round of amplification due to reduction in primer length is overcome in the second round. Second, INAs have a very high affinity for complementary DNA, with stabilisations of up to 10 degrees for internally placed intercalator pseudonucleotides (IPNs) and up to 11 degrees for end position IPNs. In addition, IPNs maximally stabilise DNA in AT-rich surroundings which make them especially advantageous when applied to bisulphite treated DNA. The IPNs are typically placed as bulge or end insertions in to the INA molecule. Thus by combining INAs with the bisulphite conversion methodology it is possible to reduce the size of the primer. This allows the creation of perfect matches for PCR amplification primers for the derivatives of individual HPV types, thus ensuring the reliable amplifications seen in FIG. 4.

[0256] We illustrate the general molecular detection methodology in step by step examples beginning with the use of ‘universal’ primers in the L1 region of different HPV types. The illustrations are for the ‘top’ strand only. It will be appreciated, however, that similar example can be obtained using the bottom strand.

### Is any HPV DNA of any Type Detectable in a Clinical Sample?

[0257] FIG. 5 shows PCR amplification products visualized after gel electrophoresis using HGS complexity-reduced primers for the L1 region of bisulphite-treated. HPV DNA extracted from liquid based cytology (LBC) specimens from sixteen female patients. The DNA amplification product is of the same size from all patients, and has been sequenced to verify that it is the correct amplified nucleic acid product from the region under scrutiny. The lengths of all the primers used in the generation of data in FIGS. 5 to 12 are shown in Table 2 and the sequences of the ‘universal’ complexity-reduced primers for FIG. 5 are also given in the Table 1.

TABLE 2
Expected fragment sizes in base pairs of amplified nucleic
acid products generated from different HPV derivatives
selected from the three major risk types.
HPV Risk Category PCR product band size (bp)

| High | Size | Medium | Size | Low | Size |
|---|---|---|---|---|---|
| HPV16 | 205 | HPV31 | 216 | HPV6 | 353 |
| HPV18 | 231 | HPV33 | 234 | HPV11 | 268 |
| HPV45 | 217 | HPV35 | 351 | HPV30 | 302 |
| HPV56 | 272 | HPV39 | 230 | HPV42 | 228 |
| | | HPV51 | 251 | HPV43 | 251 |
| | | HPV52 | 259 | HPV44 | 246 |
| | | HPV58 | 182 | HPV53 | 207 |
| | | | | HPV54 | 248 |
| | | | | HPV55 | 303 |
| | | | | HPV66 | 255 |

[0258] The data of FIG. 5 revealed that LBC samples from eleven of the 16 patients, (patient #1, #2, #3, #4, #6, #9, #11, #13, #14, #15, and #16) were positive for part of an HPV viral derivative. Given that these patient samples are HPV positive, what different types of viral genomes do these derivatives represent?

### Determining the Presence, or Absence, of a High-Risk Category of HPV Type—are There any High Risk Hpv Types Present in the Positive Patient Samples?

[0259] FIG. 6 shows multiplex PCR amplifications using HGS complexity-reduced primers for the E7 region where the primers are a mix made from the high risk HPV16, HPV18, HPV45 and HPV56 genomes. These primers will report on whether sequences from these four high-risk types are present, but not on which specific type it may be. The data reveal that positive amplifications are found in samples of patients #3, #4, #6, #9, #11, #13, #14 and #16. These eight patients thus harbour at least one high risk HPV type. Since the assay is a multiplex one, further PCR amplifications with primers specific for each high-risk HPV type are the next step. It should be noted that the negative cases provide an excellent control for the PCR reactions. The samples from patients #5, #7, #8, #10 and #12 should have yielded no amplified products (since they revealed no virus in the initial screen), and such is indeed the case.

Which of the Four High Risk Hpv Types does a Patient Harbour?

[0260] We first tested for the presence of the high-risk HPV16 type using HGS complexity-reduced PCR primers for the E7 region and analysis by gel electrophoresis. Only samples from patients #11 and #16 were positive, indicating that they carry at least part of the genome of the high risk HPV16 strain (FIG. 7).

[0261] In a similar manner, we tested for the presence of the high-risk HPV18 type using HGS complexity-reduced PCR primers for the E7 region and analysis by gel electrophoresis. Samples from patients #3, #6, #9, #11, #13 and #16 were positive, indicating that they carry this part of the genome of the high risk HPV18 strain (FIG. 8). Thus samples from patients #11 and #16 carried portions of the genome of both HPV16 and HPV18, indicating that they are infected with at least two high-risk HPV types.

[0262] The methods can be adapted to determine whether all the genomic regions of these high-risk HPV types are present in a sample (as would be the case if the entire virus was replicating as a full length episome or if it were fully integrated into the host genome), or has the viral genome undergone any deletions and is either replicating as a deleted entity, or is only part of the virus integrated into a human chromosome.

[0263] To determine whether additional regions of the high-risk HPV types, other than E7 were present in the various patient samples, a PCR amplification using HGS complexity-reduced primers for the E4, E6 and E7 regions of HPV16 were carried out and analysed by gel electrophoresis, (FIG. 9, top, middle and lower panels). Patients #11 and #16 carried all three tested regions, namely, E4, E6 and E7, whereas patient #4 only carried E6. Since samples from patients #11 and #16 were originally positive for L1, it is clear that these two patients carried the L1, E4, E6 and E7 regions, whereas patient #4 carried only the L1 and E4 regions.

[0264] Similarly we determined if genomic regions E4, E6 and E7 were present in the high-risk HPV18 type. FIG. 10 reveals that patients #11 and #16 carried all three regions for HPV18, patients #3 and #9 carried E6 and E7, but not E4; patients #6 and #13 only carried fragment E7. Since samples from these patients were originally positive for L1, it can be seen that patients #11 and #16 carried the L1, E4, E6 and E7 regions; patients #3, #9 and #11 carried L1, E6′ and E7 regions; and patients #6 and #13 only carried L1 and E7.

[0265] Thus patients #11 and #16 were infected with two high risk HPV types, HPV16 and HPV18 and they carried all four genomic segments for which they had been tested.

[0266] Further analyses using additional patients revealed both the flow and the consistency of data production. Data for twenty patients, (denoted #A to #T are presented in FIG. 11 where the variation in viral risk type, in genomic fragment type and consistency of detection is evident.

[0267] First, patients #B, #C, #D, #E, #F, #G, #H, #I, #K, #N and #R were negative, denoted [neg], for PCR products based on the initial ‘universal’ complexity-reduced primer, and as expected, were subsequently negative for all further 28 PCR assays using high-, medium- and low-risk primers.

[0268] Patient #A was positive for HPV, denoted [pos] in column 1, but the sample did not contain any of the tested HPV high-, medium-, or low-risk types for each of the 28 different PCR amplifications. This patient was likely to carry one of the 80 or so HPV risk types which are not included in our test panel of 21 different HPV types.

[0269] Patients #J, #Q and #T were positive for high- and medium-risk HPV and subsequently were found to only carried genomic fragments from high- and medium-risk HPV types. Thus patient #J carried the E7 fragment of high-risk HPV16 and fragments from the medium-risk HPV31, 33 and 35 types.

[0270] Patients #L and #M were initially only positive for a medium-risk HPV and subsequent assays reveal only a medium-risk HPV33 type.

[0271] Patient #O was initially positive only for medium- and low-risk HPV types and subsequently was found to carry only sequences from the medium-risk HPV39 and the low-risk HPV 42 and 53 types.

[0272] Patients #P and #S were initially positive for all three risk categories and subsequently revealed all three risk category types when analysed in finer detail.

[0273] It will be appreciated that the examples described above are only illustrative of some of the range of testing possible. For example, in order to begin with an assay for any HPV type, instead of just the universal L1 fragment, we could have harnessed a multiplex complexity-reduced primer set that covered the entire HPV derivative. In this manner, there would be no ambiguity if the initial PCR amplification was negative.

[0274] In addition, one of the major problems that afflicts the prior art on sequence amplification is revealed in an analysis of the primer degeneracy problem (FIG. 12). PCR alpha is a PCR on samples from patients #s 21-42, for high- and medium-risk types, whereas PCR beta is for high-, medium-, and low-risk types on the same samples. FIG. 12 shows the effect of increasing primer degeneracy on PCR amplification efficiency. As can be seen, increasing the degeneracy of primer #1 in PCR reaction beta results in a complete failure to PCR amplify any sequences. The primer population has now become so degenerate that only a smear is produced. This is a result of the primer now binding to and extending off numerous less specific decoy loci in the derivative.

### The Details of the HPV Sequence Conversions and Properties of Primers

[0275] The results of the step by step conversion of an HPV sequence and the generation of appropriate primers is illustrated in FIGS. 13 and 14. Each HPV type has two complementary strands, denoted top and bottom, and each will be illustrated separately.

[0276] FIG. 13 shows the top strand of the HPV16 viral nucleic acid molecule in its three possible sequences; the normal viral sequence, the derivative sequence with uracils replacing cytosines, and the genomically simplified sequence where uracils have been replaced by thymines. The normal sequence containing all four regular bases begins as 5′ ACTACAATAATTCATG (SEQ ID NO: 706). When the cytosines are converted to uracils to form the derivative strand, the sequence still contains four bases, but one is now uracil, and it becomes 5′ AUTAUAATAATTUATG (SEQ ID NO: 707). When amplification takes place and the uracils are replaced by thymines, the sequence becomes 5′ ATTATAATAATTTATG (SEQ ID NO: 708) and is termed to be genomically simplified since it contains only three bases A, T and G. This formation of a derivative molecule followed by simplification is termed 4 to 3. It will be appreciated that if any part of the viral sequence becomes methylated on a cytosine, then that particular modified base, at that position, will not be converted to a uracil.

[0277] FIG. 14 shows the bottom strand of the HPV16 viral nucleic acid molecule in its three possible sequences; the normal viral sequence, the derivative sequence with uracils replacing thymines, and the genomically simplified sequence where uracils have been replaced by thymines. The bottom strand begins 5′ TGATGTTATTAAGTAC (SEQ ID NO: 709), becomes the derivative beginning 5′ TGATGTTATTAAGTAU (SEQ ID NO: 710), and finally a genomically simplified sequence beginning 5′ TGATGTTATTAAGTAT (SEQ ID NO: 711), etc.

[0278] Although the top and bottom strands were initially complementary, it can now be appreciated that in their genomically simplified forms they are quite different and non complementary. Hence primers used in amplifying regions of these two strands occur in different regions of the two genomically simplified landscapes. This is illustrated in the “helicopter” view of the different top and bottom strands.

[0279] FIG. 15 is a schematic of the genomic landscape of the top strand of HPV 16 from nucleotide position #1 to nucleotide position #7904 with the boxes indicating the positions of various nested primer sets used for amplification purposes. The positions of primers that are useful for amplifying DNA from a combinations of HPV types, such as high and medium risk, (denoted HM) and high, medium and low risk, (denoted HML); high, (denoted H) and high and medium, (denoted HM) are as indicated. Some regions of the top strand for example, have been found more useful for amplification purposes than other regions. It will be appreciated that using the present invention to simplify the genome of HPV, other regions of interest and use can be identified.

[0280] FIG. 16 is a schematic of the genomic landscape of the bottom strand of HPV 16 from nucleotide position #1 to nucleotide position #7904 with the boxes indicating the positions of various nested primer sets used for amplification purposes. The positions of primers that are useful for amplifying DNA from a combinations of HPV types are as indicated. The regions of the bottom strand that are useful for amplification purposes differ from those of the top strand. Some regions of the bottom strand for example, have been found more useful for amplification purposes than other regions. It will be appreciated that using the present invention to simplify the genome of HPV, other regions of interest and use can be identified.

### Clinical Samples and the Comparisons Between the FDA Approved Diagnostic Methodology Using Hybrid Capture 2 Versus the HGS “Derivative” and “Genomically Simplified” Amplification Technology

[0281] Currently the only FDA approved diagnostic test for the presence of various HPV types utilizes thirteen HPV types, as described earlier. We have found that the genomically simplified methodology according to the present invention is superior to that of the commercially available methods. FIGS. 17 through 21, Tables 1 through 4, and finally our description of a High Throughput High-Risk HPV DNA Detection and Typing Kit further teach the present invention.

[0282] In what follows, many of the clinical samples have been examined cytologically, and hence the cytological data can be correlated with the molecular data to determine the sensitivity and specificity of the competing technologies.

[0283] To begin cytologically, FIG. 17 shows a tissue section from a patient with cervical carcinoma. Arrow 1 reveals a darkened area of cancerous cells with large nuclei. Arrow 2 shows normal connective tissue. The cytological descriptions are termed normal if no abnormalities are visible cytologically; Low grade Squamous Intraepithelial Lesions (LSILs; CIN1); High grade Squamous Intraepithelial Lesions (HSILs); CIN2, CIN3 (Cervical Intraepithelial Neoplasia) as described in earlier classical descriptions by some pathologists, or as ASC-US, (Atypical Squamous Cells of Unknown Significance).

[0284] FIGS. 18 and 19 are illustrative of how to type for the presence of a high level HPV type, namely, is any one of thirteen HPV types present in a clinical sample, and if so, (as revealed by whether any sample is positive by visualization of an amplicon on a gel), to drill down and ask what specific HPV type was actually present. These steps were performed on 12 patients all of whom had a cytological examination and some of whom had surgical treatment for their medical condition.

[0285] FIG. 18 shows the results of PCR amplifications using the high-medium risk HGS complexity-reduced primers for the detection of thirteen HPV types, namely HPV 16, 18, 31, 33, 35, 39, 45, 51, 52, 56, 58, 59 and 68) for the ‘top’ strand of the E7 region of bisulphite-treated HPV DNA extracted from liquid-based cytology (LBC) specimens from twelve patient samples in which cytological analyses had been completed, (denoted #s 1 to 12). Positive results are seen from patients #2, 4, 7 and 11, three of whom were deemed to have high grade lesions as determined cytologically. None of the remaining individuals who had normal cytology, namely patients #1, 3, 5, 8, 10, 12 revealed any high-medium risk HPV, nor did the two patients who had received treatment for HSIL, #6 and 9.

[0286] To determine which HPV types were present in the four patients who tested positive for High-medium HPV types, further genotyping was performed.

[0287] FIG. 19 shows the results of a PCR amplification using material from clinical samples #2, #4, #7 and #11 from the patients that were positive for a high-medium risk HPV in FIG. 18 and a determination of exactly which of the HPV types (HPV 16, 18, 31, 33, 35, 39, 45, 51, 52, 56, 58, 59 and 68) were responsible for each of the amplicons visible in FIG. 18. As can be seen by visualization of amplicons in the four gels illustrated, patient #2 had HPV31, patients #4 and #7 had had HPV16 while patient #11 had HPV18 and HPV35.

[0288] While Liquid Based Cytology sampling is becoming the norm in HPV testing, many tests are still carried out on samples that have been taken from the urinogenital areas, fixed, sectioned and available on slides that, in general, have been archived. To determine how well the HGS genomically simplified method performs on such archival material, amplifications were performed on samples obtained from patients with High Grade Squamous Intraepithelial Lesions.

[0289] FIG. 20 shows the results of PCR amplification from archival paraffin sections from material from 16 patients with High grade Squamous Intraepithelial Lesions (HSILs) using high-medium risk primer sets (HPV 16, 18, 31, 33, 35, 39, 45, 51, 52, 56, 58, 59 and 68), made to the genomically simplified top strand of HPV. Fifteen of the 16 patients (94%) were positive by this methodology consistent with the literature on the presence of HPV in HSIL.

[0290] Finally, since most of the results described herein utilized the top strand of HPV for primer production, it was necessary to demonstrate the bottom strand would also be of equal use in HPV detection systems. This is illustrated in FIG. 21.

[0291] Primers used for the detection of the bottom strand HPV DNA sequences were designed for the detection of both high-medium risk types sets (HPV 16, 18, 31, 33, 35, 39, 45, 51, 52, 56, 58, 59 and 68) and low-risk types (HPV 6, 11, 42, 43, 44, 53, 54 and 55) resulting in a primer set that picks up ano-genital HPV types in a more universal fashion. Thus these primers detected the presence of HPV in samples A3 and A4 while the top strand high-medium primers did not. This indicates the presence of an HPV type not considered in the high-medium risk category.

[0292] FIG. 21 A shows the results of PCR amplification from Liquid Based Cytology samples using primers made to the bottom strand of bisulphite converted, genomically simplified DNA. The primers targeted the thirteen HPV types (high-medium risk HPV 16, 18, 31, 33, 35, 39, 45, 51, 52, 56, 58, 59, 68 and low-risk HPV 6, 11, 42, 43, 44, 53, 54 and 55). Amplicons are found in 40 of the 60 samples tested (67%) indicating the presence of an anogenital HPV infection.

[0293] FIG. 21 B shows the results of PCR amplification from Liquid Based Cytology samples using primers made to the top strand of bisulphite converted, genomically simplified DNA. The primers targeted the thirteen HPV types, (HPV 16, 18, 31, 33, 35, 39, 45, 51, 52, 56, 58, 59 and 68). Amplicons are visible in 28 of the 60 samples tested (47%) indicating the presence of a high-medium type HPV infection.

### Hybrid Capture 2 Tests for HPV Versus HGS Testing on the Same Samples

[0294] Results of the use of the present invention is shown in even greater detail in Tables 3 and 4 which show hundreds of clinical samples tested not only by competing methods, but which also have a cytological description of the material used for testing.

[0295] Tables 3A, B, C. Three different sets of Liquid Based Cytology clinical samples initially tested using the Digene methodology of Hybrid Capture 2, and then tested using the HGS amplification methodology for the presence of various HPV types.

TABLE 3A

| | | HM | HM-E7 | HC2 | | |
|---|---|---|---|---|---|---|
| ID# | Control | HPV | genotype | HR | RFU | Cytology |
| 1 | POS | NEG | | NEG | | Negative |
| 2 | POS | NEG | | NEG | | Negative |
| 3 | POS | NEG | | NEG | | Negative |
| 4 | POS | NEG | NEG | NEG | | Negative |
| 5 | POS | NEG | NEG | NEG | | Negative |
| 6 | POS | NEG | | NEG | | Negative |
| 7 | POS | NEG | | NEG | | Negative |
| 8 | POS | POS | | POS | | Low Grade |
| 9 | POS | POS | | POS | | High Grade |
| 10 | POS | NEG | | NEG | | Negative |
| 11 | POS | NEG | | NEG | | Negative |
| 12 | POS | NEG | | NEG | | Negative |
| 13 | POS | NEG | | NEG | | Negative |
| 14 | POS | NEG | | POS | 323 | Negative |
| 15 | POS | POS | | POS | 4103 | Low Grade |
| 16 | POS | POS | | POS | 428708 | Low Grade |
| 17 | POS | POS | 56 | NEG | | Not Done |
| 18 | POS | POS | 56 | POS | 377 | Not Done |
| 19 | POS | POS | | POS | 301 | Low Grade |
| 20 | POS | POS | | POS | 7562 | Low Grade |
| 21 | POS | NEG | | NEG | | Negative |
| 22 | POS | POS | | POS | 890 | Low Grade |
| 23 | POS | POS | 59 | NEG | | Negative |
| 24 | POS | NEG | | NEG | | Low Grade |
| 25 | POS | POS | | POS | 39404 | Low Grade |
| 26 | POS | POS | | POS | 67964 | Negative |
| 27 | POS | NEG | | NEG | | Negative |
| 28 | POS | NEG | | NEG | | Negative |
| 30 | POS | NEG | | NEG | | Negative |
| 31 | POS | NEG | | NEG | | Negative |
| 32 | POS | POS | | POS | 412424 | Low Grade |
| 33 | POS | POS | 16, 31 | NEG | | Negative |
| 34 | POS | NEG | | NEG | | Negative |
| 35 | POS | NEG | | | | |
| 36 | POS | POS | | POS | | Negative |
| *37 | POS | POS | 16, 33, 52 | NEG | | Negative |
| 38 | POS | POS | 16, 52 | NEG | | Negative |
| 39 | POS | POS | | POS | 510642 | Low Grade |
| 40 | POS | POS | | POS | 580914 | Low Grade |
| 41 | POS | NEG | | NEG | | Negative |
| 42 | POS | NEG | | NEG | | Negative |
| 43 | POS | POS | NEG | POS | 7939 | Low Grade |
| 44 | POS | NEG | | NEG | | Negative |
| 45 | POS | NEG | | NEG | | Negative |
| 46 | POS | POS | NEG | NEG | | Low Grade |
| | | | | | | CIN 1 |
| 47 | POS | NEG | | NEG | | Negative |
| 48 | POS | NEG | | POS | 341 | Negative |
| 49 | POS | NEG | | NEG | | Negative |
| 50 | POS | NEG | | NEG | | Low Grade |
| 51 | POS | NEG | | NEG | | Negative |
| 52 | POS | NEG | | NEG | | Negative |
| 53 | POS | NEG | | NEG | | Negative |
| 54 | POS | POS | 16, 31, 51 | POS | 211637 | Low Grade?? |
| 55 | POS | NEG | | NEG | | Negative |
| 56 | POS | NEG | | NEG | | Negative |
| 57 | POS | NEG | | POS | 783 | Negative Bx |
| 58 | POS | NEG | | NEG | | Negative |
| 59 | POS | NEG | | NEG | | Unsat Neg |
| 60 | POS | NEG | | POS | 1081 | Negative |
| 61 | POS | POS | 51 | POS | 3542 | High Grade |
| 62 | POS | NEG | | NEG | | Negative |
| 63 | POS | NEG | | NEG | | Negative |
| 64 | POS | POS | NEG | NEG | | Not Done |
| 65 | POS | POS | 56 | POS | 140824 | Low Grade |
| 66 | POS | POS | 16 | NEG | | Hx CIN 2 |
| 67 | POS | NEG | | NEG | | Negative |
| 68 | POS | NEG | | NEG | | Negative |
| 69 | POS | NEG | | NEG | | Negative |
| 70 | POS | POS | | POS | 12222 | CIN 1 HPV |
| 71 | POS | NEG | | POS | 1657 | Negative |
| 72 | POS | NEG | | NEG | | Negative |
| 73 | POS | NEG | | NEG | | Negative |
| 74 | POS | NEG | | NEG | | Negative |
| 75 | POS | POS | | POS | 79295 | Low Grade |

*Swab

TABLE 3B

| | | HM- | HM E7 | HC2 | HC |
|---|---|---|---|---|---|
| ID# | Control | HPV | Genotype | LR | HR |
| 76 | POS | POS | 31, 56 | − | + |
| 77 | POS | POS | 52 | − | + |
| 78 | POS | NEG | | − | − |
| 79 | POS | POS | 31 | − | − |
| 80 | POS | POS | 39, 59, 68 | + | + |
| 81 | POS | NEG | | − | − |
| 82 | POS | POS | 18 | − | + |
| 83 | POS | POS | 31 | + | − |
| 84 | POS | POS | 51 | − | + |
| 85 | POS | NEG | | − | − |
| 86 | NEG | POS | | − | − |
| 87 | POS | NEG | | − | − |
| 88 | POS | POS | 31 | − | − |
| 89 | POS | POS | 31 | − | − |
| 90 | POS | NEG | | − | − |
| 91 | POS | NEG | | − | − |
| 92 | POS | NEG | | − | − |
| 93 | POS | POS | 59 | − | + |
| 94 | POS | POS | 16, 51 | + | + |
| 95 | POS | POS | 39 | + | + |
| 96 | POS | NEG | | − | − |
| 97 | POS | POS | | − | − |
| 98 | POS | POS | | − | − |
| 99 | POS | NEG | | − | − |
| 100 | POS | NEG | | − | − |
| 101 | POS | NEG | | − | − |
| 102 | POS | POS | 18 | − | − |
| 103 | POS | NEG | | − | − |
| 104 | POS | POS | 33 | − | − |
| 105 | POS | NEG | | − | − |
| 106 | POS | POS | | − | − |
| 107 | POS | POS | 56 | − | + |
| 108 | POS | NEG | | − | − |
| 109 | POS | POS | 31 | − | − |
| 110 | POS | POS | 16, 31, 51, 52 | − | + |
| 111 | POS | POS | 52, 59 | − | + |
| 112 | POS | POS | 56 | − | + |
| 113 | POS | NEG | | − | − |
| 114 | POS | NEG | | − | − |
| 115 | POS | NEG | | − | − |
| 116 | POS | NEG | | − | − |
| 117 | POS | NEG | | − | − |
| 118 | POS | NEG | | − | − |
| 119 | POS | POS | 45 | − | − |
| 120 | POS | POS | 16, 45, 68 | − | + |
| 121 | POS | NEG | | − | − |
| 122 | POS | POS | 39, 68 | − | − |
| 123 | POS | POS | 39, 68 | − | + |
| 124 | POS | NEG | | + | − |
| 125 | POS | NEG | | − | − |
| 126 | POS | NEG | | − | − |
| 127 | POS | NEG | | − | − |
| 128 | POS | POS | 31 | − | − |
| 129 | POS | NEG | | − | − |
| 130 | POS | POS | 31 | + | − |
| 131 | POS | NEG | | − | − |
| 132 | POS | NEG | | + | − |
| 133 | POS | NEG | | − | − |
| 134 | POS | NEG | | − | − |
| 135 | POS | POS | 68 | − | − |
| 136 | POS | NEG | | − | − |
| 137 | POS | NEG | | − | − |
| 138 | POS | POS | 16 | − | + |
| 139 | POS | NEG | | − | − |
| 140 | POS | NEG | | − | − |
| 141 | POS | NEG | | − | − |
| 142 | POS | NEG | | − | − |
| 143 | POS | POS | 45 | − | − |
| 144 | POS | POS | 16, 45 | + | + |

TABLE 3C

| | | | HM-E7 | LR-E7 | | | | | |
|---|---|---|---|---|---|---|---|---|---|
| ID# | Control | HM-HPV | Genotype | Genotype | HC2-HR | RFU | HC2-LR | RFU | Cytology |
| 172 | POS | NEG | | | NEG | 55 | NEG | 65 | Normal |
| 173 | POS | NEG | | | NEG | 153 | NEG | 101 | Normal |
| 174 | NEG | POS | | | NEG | 292 | NEG | 105 | Normal |
| 175 | POS | POS | 59 | | POS | 768212 | NEG | 58 | LSIL |
| 176 | POS | NEG | | | NEG | 152 | NEG | 78 | Normal |
| 177 | POS | NEG | Not Detected | | POS | 734 | NEG | 46 | Normal |
| 178 | POS | NEG | | | NEG | 64 | NEG | 84 | LSIL |
| 179 | POS | POS | 45 | | POS | 204963 | NEG | 54 | LSIL |
| 180 | POS | NEG | 18 | | POS | 103404 | NEG | 42 | Normal |
| 181 | POS | NEG | | | NEG | 68 | NEG | 46 | Normal |
| 182 | POS | POS | 16 | | POS | 754 | POS | 29164 | LSIL |
| 183 | NEG | POS | NEG | 42 | POS | 568 | POS | 45548 | LSIL |
| 184 | POS | NEG | | | NEG | 168 | NEG | 58 | Normal |
| 185 | NEG | NEG | | | NEG | 62 | NEG | 40 | Normal |
| 186 | POS | POS | 18 | | POS | 3153 | NEG | 55 | HSIL |
| 187 | POS | NEG | | | NEG | 71 | NEG | 47 | Normal |
| 188 | POS | NEG | | | NEG | 66 | NEG | 36 | Normal |
| 189 | POS | NEG | | | NEG | 55 | NEG | 55 | Normal |
| 190 | POS | NEG | | | NEG | 34 | NEG | 34 | Normal |
| 191 | POS | NEG | | | NEG | 96 | NEG | 82 | ASCUS |
| 192 | POS | POS | 33 | | POS | 132844 | POS | 156190 | LSIL |
| 193 | POS | NEG | | | NEG | 115 | NEG | 63 | Normal |
| 194 | POS | POS | 51, 58, 68 | | POS | 153881 | POS | 52619 | LSIL |
| 195 | POS | NEG | | | NEG | 43 | NEG | 47 | Normal |
| 196 | POS | NEG | | | NEG | 112 | NEG | 60 | ASCUS |
| 197 | POS | NEG | | | NEG | 135 | NEG | 143 | Normal |
| 198 | NEG | NEG | | | NEG | 80 | NEG | 48 | Normal |
| 199 | POS | POS | 52 | | POS | 237578 | NEG | 103 | LSIL |
| 200 | NEG | POS | 33, 58 | | POS | 55052 | NEG | 80 | LSIL |
| 201 | POS | NEG | | | NEG | 57 | NEG | 69 | Normal |
| 202 | POS | POS | 51 | | POS | 105731 | NEG | 81 | Normal |
| 203 | POS | POS | 51, 56 | | POS | 712162 | NEG | 167 | LSIL |
| 204 | POS | NEG | | | NEG | 115 | NEG | 185 | Normal |
| 205 | POS | NEG | | | NEG | 92 | NEG | 36 | Normal |
| 206 | POS | NEG | | | NEG | 60 | NEG | 82 | Normal |
| 207 | POS | NEG | NEG | NEG | NEG | 105 | NEG | 55 | LSIL |
| 208 | NEG | POS | 51 | | POS | 336180 | NEG | 154 | LSIL |
| 209 | POS | POS | 16, 35 | | POS | 142232 | NEG | 150 | LSIL |
| 210 | NEG | NEG | | | NEG | 83 | NEG | 37 | Normal |
| 211 | POS | POS | 56 | | POS | 514728 | NEG | 49 | LSIL |
| 212 | POS | NEG | | | NEG | 56 | NEG | 52 | Normal |
| 213 | POS | NEG | | | NEG | 122 | NEG | 38 | Normal |
| 214 | POS | POS | 68 | | POS | 2536 | NEG | 48 | LSIL |
| 215 | POS | NEG | | | NEG | 42 | NEG | 60 | Normal |
| 216 | POS | POS | Not Detected | | POS | 2304 | POS | 31290 | LSIL |
| 217 | POS | POS | 56 | | POS | 13416 | NEG | 28 | LSIL |
| 218 | POS | POS | 16, 31 | | POS | 197601 | NEG | 99 | LSIL |
| 219 | NEG | NEG | | | NEG | 51 | NEG | 53 | Normal |
| 220 | POS | NEG | Not Detected | | POS | 1128 | NEG | 126 | Normal |
| 221 | POS | NEG | | | NEG | 116 | NEG | 100 | Normal |
| 222 | POS | POS | 56 | | POS | 456079 | NEG | 60 | LSIL |
| 223 | POS | NEG | | | NEG | 125 | POS | 114103 | ASCUS |
| 224 | NEG | NEG | | | NEG | 105 | NEG | 65 | ASCUS |
| 225 | POS | NEG | | | NEG | 65 | NEG | 73 | Normal |
| 226 | POS | NEG | | | NEG | 64 | NEG | 60 | Normal |
| 227 | POS | POS | 56 | | POS | 85613 | POS | 217685 | LSIL |
| 228 | POS | POS | 52 | | POS | 97012 | POS | 846 | Normal |
| 229 | POS | POS | 52 | | POS | 72556 | POS | 3114 | ASCUS |
| 230 | POS | NEG | | | NEG | 160 | NEG | 112 | Normal |
| 231 | POS | NEG | | | NEG | 154 | NEG | 52 | Normal |
| 232 | POS | POS | NEG | 53 | POS | 2628 | NEG | 86 | LSIL |
| 233 | POS | NEG | | | NEG | 86 | NEG | 58 | Normal |
| 234 | POS | POS | 16 | | POS | 96880 | NEG | 66 | ASCUS |
| 235 | POS | POS | 16, 51 | | POS | 568895 | NEG | 69 | LSIL |
| 236 | POS | POS | 56 | | POS | 95587 | NEG | 47 | Normal |
| 237 | POS | NEG | | | NEG | 117 | NEG | 113 | Normal |
| 238 | POS | POS | 16 | | POS | 27156 | NEG | 82 | LSIL |
| 239 | POS | NEG | Not Detected | | POS | 678 | NEG | 30 | Normal |
| 240 | POS | NEG | | | NEG | 90 | NEG | 82 | Normal |
| 241 | POS | NEG | Not Detected | | POS | 3130 | NEG | 88 | ASCUS |
| 242 | POS | POS | 59 | | POS | 95149 | NEG | 65 | LSIL |
| 243 | ND | ND | | | NEG | 56 | NEG | 184 | Normal |
| 244 | POS | POS | 56 | | POS | 22698 | POS | 81756 | LSIL |
| 245 | POS | POS | 18, 39 | | POS | 519145 | POS | 53404 | LSIL |
| 246 | POS | POS | 52, 68 | | POS | 454883 | POS | 4884 | LSIL |
| 247 | POS | NEG | | | NEG | 74 | NEG | 74 | ASCUS |
| 248 | POS | NEG | | | NEG | 98 | NEG | 36 | Normal |
| 249 | POS | POS | NEG | 30, 66 | POS | 6376 | NEG | 44 | LSIL |
| 250 | POS | NEG | | | NEG | 82 | NEG | 44 | Normal |
| 251 | POS | NEG | | | NEG | 43 | POS | 693 | Normal |
| 252 | POS | NEG | | | NEG | 150 | NEG | 60 | Normal |
| 253 | POS | NEG | | | NEG | 75 | NEG | 71 | Normal |
| 254 | POS | NEG | | | NEG | 127 | NEG | 51 | Normal |
| 255 | NEG | NEG | | | NEG | 64 | NEG | 68 | Normal |
| 256 | POS | POS | 33, 52, 58 | | POS | 356051 | NEG | 61 | LSIL |
| 257 | POS | NEG | | | NEG | 53 | NEG | 57 | Normal |
| 258 | POS | NEG | | | NEG | 267 | NEG | 111 | Normal |
| 259 | POS | NEG | | | NEG | 47 | POS | 1223 | Normal |
| 260 | POS | NEG | | | NEG | 110 | NEG | 32 | ASCUS |
| 261 | POS | NEG | | | NEG | 144 | NEG | 40 | Normal |
| 262 | POS | NEG | | | NEG | 55 | NEG | 67 | ASCUS |
| 263 | POS | NEG | | | NEG | 133 | NEG | 59 | Normal |
| 264 | POS | NEG | NEG | NEG | NEG | 94 | NEG | 52 | LSIL |
| 265 | POS | NEG | | | NEG | 93 | NEG | 63 | Normal |
| 266 | NEG | POS | 16, 31 | | POS | 1800 | NEG | 52 | HSIL |
| 267 | POS | NEG | | | NEG | 48 | NEG | 66 | Normal |
| 268 | ND | | | | NEG | 113 | NEG | 177 | Normal |
| 269 | ND | | | | POS | 1166 | NEG | 46 | Normal |
| 270 | ND | | | | NEG | 79 | NEG | 49 | Normal |
| 271 | POS | NEG | Not Detected | | POS | 1052 | NEG | 36 | Normal |

[0296] Table 3 has three parts, A, B and C, which reflect the different sources of discarded material used in the analyses. Three different sets of Liquid Based Cytology clinical samples which had initially been tested using the Digene methodology of Hybrid Capture 2, were then tested using the HGS amplification methodology for the presence of various HPV types.

[0297] Table 3A used discarded samples from patients tested in Australia. Column 1 gives the HGS identification number; column 2 is a control which determined whether any genomic DNA was present in a sample; column 3 describes whether the sample was positive for any high-medium risk HPV type (HPV 16, 18, 31, 33, 35, 39, 45, 51, 52, 56, 58, 59 and 68); column 4 provides the status of the type(s) of high-medium risk HPV found; column 5 shows the results obtained using the Hybrid Capture 2 test; column 6 provides the relative fluorescent units that are a characteristic of the Hybrid Capture 2 test, where relative fluorescent units are compared with internal standards to determine the cut-off for a positive or negative signal, and column 7 lists the cytological characteristics of the sample (if available). Finally *37 shows a swab sample rather than a LBC.

[0298] The comparison between the two methodologies is startling. Many Hybrid Capture 2 tests which are deemed to be negative, were in fact found positive by the HGS genomically simplified HGS test, and HGS test identified the type of HPV present. The Hybrid Capture 2 test therefore generated a high proportion of “false negatives”. These are individual patients who leave the clinic with a false sense of security after a test, believing that they are virus free, when in fact they are carriers. In addition, while the cytology may be negative for some individuals, the HGS test nevertheless unambiguously types the HPV which is present.

[0299] Furthermore, many Hybrid Capture 2 tests which were deemed to be positive on the basis of fluorescence were actually found negative by the HGS test. Since the HGS test is so sensitive, many patients found to be positive by the Hybrid Capture 2 test were in fact “false positives” determined by the HGS test. Patients in this category by the Hybrid Capture 2 test would leave the clinic with the anxiety of being potential cervical cancer victims, when in fact no virus is present.

[0300] Table 3B utilized discarded Liquid Based Cytology samples from patients in Hong Kong. Columns are similar except that the Hybrid Capture 2 tests have been carried out for both the low risk and high risk types. Again, the HGS genomically simplified test revealed many discordances between the two types of tests, even though the samples are from two quite different geographical locations and predominantly different ethnic groups.

[0301] Table 3C is also material from Hong Kong based samples and again the HGS test is discordant in a high proportion of cases with the Hybrid Capture 2 test. Column 1 and 2 represent the ID# and the positive control for the presence of human genomic DNA; column 3 indicates the presence or absence of high-medium risk HPV types; column 4 represents high-medium E7 genotype; column 5 shows the low-risk E7 genotype; column 6 represents the HC2 high risk call and column 7 the corresponding relative fluorescent units for that sample; column 8 and 9 show the HC2 low risk call and the corresponding relative fluorescent units for that sample; column 10 illustrates the cytology for that particular sample using standard descriptors.

TABLE 4
Genotyping of Liquid Based Cytology clinical
samples for various HPV types using primers
to the E7, E5 and E4 regions of HPV virus.

| | E7 | E6 | E5 | E4 |
|---|---|---|---|---|
| HR-HPV | Genotype | Genotype | Genotype | Genotype |
| POS | 31, 56 | | | 31 |
| POS | 52 | 52 | | |
| POS | (31) | | | |
| POS | 39, 59, 68 | 59 | | 59 |
| POS | 18 | | | |
| POS | (31) | | | |
| POS | 51 | 51 | | 51? |
| POS | (31) | | | |
| POS | (31) | | | |
| POS | 59 | | | |
| POS | 16, 51 | | | |
| POS | 39 | 39 | 39 | 39 |
| POS | 18 | | | |
| POS | 33 | | | |
| POS | 56 | 56 | | 56 |
| POS | 31 | | | |
| POS | 16, 31, 51, 52 | 31. 52 | | 31, 52 |
| POS | 52, 59 | 59 | | |
| POS | 56 | 56 | | 56 |
| POS | 45 | | | |
| POS | 16, 45, 68 | 16, 45 | 16 | 45? |
| POS | 39, 68 | | | 39 |
| POS | 39, 68 | | | |
| POS | (31) | | | |
| POS | (31) | | | |
| POS | 68 | | | |
| POS | 16 | 16 | 16 | |
| POS | 45 | | | |
| POS | 16, 45 | 45 | | 45? |
| POS | 33, 52, 58 | 33, 58 | | 33, 58 |
| POS | 52, 58 | 52 | | 52 |
| POS | 18, 33, 52, 56, 58 | 52, 56, 58 | | 52, 56 |
| POS | 18, 56, 58, 68 | 58 | | |
| POS | 56, 59, 68 | 56, 59 | | 56 |
| POS | 33, 51, 52, 58 | | | |
| POS | 33, 51, 52 58 | 51, 58 | | 51? |
| POS | 33, 52, 58 | 33 | | 33 |

[0302] Table 4 reveals that primers made to the E7 region of HPV are very useful primer sets (in preference to primers made to the E5, E6 and E4 regions of the virus).

[0303] Table 4 shows the results of genotyping Liquid Based Cytology clinical samples for various HPV types using primers to the E7, E6, E5 and E4 regions of HPV virus. The presence of HPV types in column 1 and the presence or absence of amplicons using the different primer sets to the E7, E6, E5 and E4 regions of the virus is shown in column 2-5. It is salient that E7 primers picked up the particular HPV types that are present, but in many cases E6, E5 and E4 fail to do so. E7 is therefore an excellent region to use. The reasons for this are that HPV often deletes portions of it's genome after infecting a cell, and E7 is a region that is retained with higher probability than others.

Amplified DNA is from HPV

[0304] A clinical sample from the region of a human cervix, or from a Liquid Based Cytology sample, usually contains a heterogeneous population of human cells, together with a microorganism flora that can be extensive. Amplification of HPV sequences from such a heterogeneous source (in all cases we have tested), yield amplicons of the correct size as estimated from their migration on gels. However, the best indicator that the amplicons are indeed from HPV, and not from a source that serendipitously has the same molecular weight as the visible bands on a gel, is to excise a given band from a gel and subject the DNA within it to direct sequence analysis. We have carried this analysis and have confirmed that the DNA sequence does indeed correspond to that of HPV16. Results of such an analysis are shown in FIG. 22.

### High Throughput HPV Assay

[0305] The present invention can be used step by step in a high throughput manner using a 96 well plate in which many samples are simultaneously tested for HPV. This is illustrated by instructions for a potential commercial kit as follows.

TABLE 5
Contents of an HPV High Throughput
DNA Bisulphite Modification Kit

| Component Name | Contents | | Part Number |
|---|---|---|---|
| Lysis Buffer | 1 × 23 | ml | |
| Proteinase K | 2 × 1 | ml | |
| Reagent 1 | 1 × 20.8 | ml | |
| Reagent 2 | 1 × 8 | g | |
| Reagent 3 | 1 × 25 | ml | |
| Reagent 4 | 1 × 7 | ml | |
| Control Sample 1 | 1 × 40 | μl | |
| Control Sample 2 | 1 × 20 | μl | |
| Control Primers 3A & 3B | 2 × 40 | μl | |
| Plate 1: Incubation plate | 1 × 96 | well | |
| Plate 2: Conversion plate | 1 × 96 | well | |
| Plate 3: Purification plate | 1 × 96 | well | |
| Plate 4: Wash plate | 1 × 96 | well | |
| Plate 5: Elution plate | 1 × 96 | well | |
| Sealing caps | 36 × 8 | cap strips | |
| Plate 6: High Risk HPV plate | 2 × 96 | well | |
| Plate 7: HPV Typing Plate | 8 × 96 | well | |
| Plate 8: Control Plate | 2 × 96 | well | |

NB. Individual High-Risk Typing primers sets are available from Human Genetic Signatures (enquire at <hpv@geneticsignatures.com>)
Note:
Control Samples/Primers 1, 2, 3A and 3B should be stored at −20° C. upon receipt.

### Materials and Equipment Required (not Supplied)

[0306] Either a vacuum manifold or a centrifuge is required as follows:

[0307] A vacuum manifold for 96 well plates with a pump to apply at least −10 in Hg (4.9 psi) pressure. (In-house testing was carried out using the Biorad Aurum Manifold but other manifolds may be adapted for use.) or

[0308] A centrifuge with a rotor compatible with a high clearance 96 well format plate. (In-house testing was carried out using an Eppendorf 5810).
[0309] Heated lid PCR Thermal Cycler compatible for 96 well format 0.2 ml low profile plates
[0310] Heated lid PCR Thermal Cycler compatible for 384 well format (for HPV typing)
[0311] 80% isopropanol (molecular biology grade)
[0312] Water (molecular biology grade)
[0313] NaOH pellets (Analytical Grade)
[0314] 2×PCR master-mix (Promega Cat#M7505 1000r×n)
[0315] E-Gel System Mother E-Base™ device (Invitrogen EB-M03)
[0316] E-gels 96 High-Throughput 2% Agarose (Invitrogen Cat#G7008-02)
[0317] E-gel Low range marker (Invitrogen Cat#12373031)
[0318] Reagent reservoirs ×5

### Standard Laboratory Equipment (not Supplied)

[0319] Multi-channel pipette, up to 1 ml volume (200 μl-1000 μl)
[0320] Multi-channel pipette, up to 200 μL volume (20 μl-200 μl)
[0321] Multi-channel pipette, up to 10 μL volume (1 μl-10 μl)
[0322] Lint-free tissue
[0323] Timer
[0324] Aerosol barrier tips (10 μl-1000 μl)
[0325] Transilluminator
[0326] Gel Documentation system
[0327] Glison P1000
[0328] Gilson P200
[0329] Gilson P20

### Methods

[0330] If using HPV High Throughput DNA Bisulphite Modification Kit for the first time, it is highly recommended that the detailed methodology in the User Guide be read before carrying out the bisulphite conversion method.

[0331] Using the HPV High Throughput DNA Bisulphite Modification Kit eliminates the need for pre-digestion of genomic DNA prior to conversion.

[0332] Do not reduce the volume of the bisulphite reagent added to the DNA sample. In-house tests have shown that reduction of the bisulphite reagent is detrimental to the reaction.

[0333] This kit is optimized for starting DNA concentrations from 1 ng up to 4 μg of genomic DNA.

### Sample Preparation

[0334] Shake the Liquid Based Sample (PreservCyt®) vial vigorously by hand to resuspend any sedimented cells and ensure the solution is homogeneous.
[0335] Transfer 4 ml of the resuspended cells to a 15 ml Costar centrifuge tube. If there is less than 4 ml of media transfer all the material to a 15 ml Costar centrifuge tube and make the volume to 4 ml with sterile distilled water. A minimum volume of 1 ml sample is required for accurate testing.
[0336] Centrifuge the tubes in a swing-out bucket rotor at 3000×g/15 minutes.
[0337] Carefully decant and discard the supernatant without disturbing the pelleted cellular material.
[0338] Resuspend the pelleted cells in 200 μl of lysis buffer and mix well until the solution is homogeneous.
[0339] Add 20 μl of Proteinase K and incubate to each well of the incubation plate.
[0340] Transfer 80 μl of the sample to the Incubation plate (Plate 1) cover with sealing caps and incubate at 55° C./1 hour.

### Protocol Preparation

[0341] Combine the total volume of Reagent 1 to the Reagent 2 bottle and mix by gentle inversion. Note: Once mixed Reagents 1 and 2 are stable for up to 1 month at 4° C. in the dark. Reagents 1, 2, 3 and 4 are stable at room temperature for 1 year from the date of manufacture.
[0342] Make a fresh NaOH solution each time (eg. 1 g NaOH in 8.3 ml water) and add 5 μl to each well of the Conversion plate (Plate 2).
[0343] Add 5 μl of Control Sample 1 to 15 μl of water (molecular biology grade) and treat in parallel with the test samples.
[0344] Transfer 20 μl of the cell lysate to the Conversion plate (Plate 2) and mix gently.
[0345] Seal the Conversion plate (Plate 2) with the sealing film provided and incubate in an oven at 37° C./15 minutes. After incubation, centrifuge the plate briefly before removing the film to precipitate any condensation on the film.
[0346] Seal the Incubation plate (Plate 1) with sealing caps provided and store at −20° C.
[0347] Ensure that Reagent 3 has not formed a solid precipitate. If so, warm the solution (not higher than 80° C.) and mix.

### Centrifugation Protocol

[0348] Add 220 μl of the combined Reagent 1 and Reagent 2 into each well of the Conversion plate (Plate 2), using a multi-channel pipette then mix by gentle pipetting and seal the plate with the 8 strip sealing caps provided.
[0349] Incubate the Conversion plate (Plate 2) in an oven at 55° C./3 hours.

[0350] Bisulphite treatment can be carried out in as little as one hour, however, reducing incubation time can result in regional non-conversion within the amplicon. Incubation times of less than 3 hours are therefore not recommended.
[0351] Following incubation add 240 μl of Reagent 3 (Refer to Important Protocol Preparation) to each well of the Conversion plate (Plate 2).
[0352] Place the Purification plate (Plate 3) on top of the Wash plate (Plate 4).
[0353] Transfer the samples from the Conversion plate (Plate 2) to the corresponding wells of the Purification plate (Plate 3) and cover with the sealing film provided.
[0354] Place the Purification plate (Plate 3)/Wash plate (Plate 4) combination into the centrifuge and spin at 1,000 rcf at room temperature/4-5 minutes.
[0355] Discard the flow-through from the Wash plate (Plate 4) then replace it under the Purification plate (Plate 3). Add 0.8 ml of 80% isopropanol (molecular biology grade) to each well of the Purification plate (Plate 3).
[0356] Centrifuge at 1,000 rcf at room temperature/1 minute.
[0357] Remove the Wash plate (Plate 4), discard the flow-through then replace and centrifuge at 1,000 rcf/2 minutes at room temperature.
[0358] Place the Purification plate (Plate 3) on top of the Elution plate (Plate 5) ensuring the tips of the Purification plate (Plate 3) are positioned within the appropriate wells of the Elution plate (Plate 5).
[0359] Add 50 μl of Reagent 4 to each sample well of the Purification plate (Plate 3) using a multi-channel pipette, placing the pipette tip close to the membrane surface without touching it.
[0360] Incubate at room temperature 1-2 minute.
[0361] Centrifuge the Purification plate (Plate 3)/Elution plate (Plate 5) combination at 1,000 rcf at room temperature/1 minute.
[0362] Remove the Elution plate (Plate 5) and seal with the sealing caps provided.
[0363] Incubate the plate in a heated lid PCR machine at 95° C./30 minutes

[0364] The DNA samples are now converted and ready for PCR amplification. After incubation centrifuge the plate briefly to remove any condensation from the sealing caps.

### Internal Control PCR Reaction

[0365] Genomic DNA and control PCR primers have been provided to allow for easy troubleshooting. Control Samples 1 (purple) and 2 (green) are provided as process controls. Control Sample 1 is untreated DNA with sufficient material provided for 8 conversion reactions. Control Sample 2 is bisulphite treated DNA with sufficient material provided for 20 PCR amplifications. Control Primers 3A (yellow) and 3B (red) are PCR primers and may be used to check the integrity of the recovered DNA (sufficient for 20 PCR amplifications provided).

[0366] ‘Nested’ PCR primers are used to further improve the sensitivity of the detection that is achieved with HPV High Throughput DNA Bisulphite Modification Kit. The control primers are conventional bisulphite PCR primers and have been optimised for two rounds of PCR amplification. The use of these PCR primers for single round PCR is not recommended as in most cases no visible amplicon band will be seen following agarose gel electrophoresis.

[0367] Note: This protocol is based on the use of a heated-lid thermal cycler. If a heated-lid thermal cycler is unavailable, overlay reactions with mineral oil.

### Control Reactions:

[0368] Control Sample 1 (purple) contains untreated genomic DNA (50 ng/μl)
[0369] Control Sample 2 (green) contains bisulphite treated human DNA (20 ng/μl)
[0370] Control Primers 3A (yellow) contains First round PCR primers
[0371] Control Primers 3B (red) contains Second round PCR primers

### Control PCR

[0372] Control Primers 3A (First round PCR primers) and Control Primers 3B (Second round PCR primers) are validated ‘nested’ primers with sufficient volume supplied for up to 20 control PCR reactions. These primer samples have been supplied to facilitate the trouble-shooting process if required, and may also be used to assess the quality of your modified DNA.

[0373] Note: The Second round PCR Reactions may be prepared in parallel with the First round PCR Reactions and frozen until required.

### High-Risk PCR Amplification

### First Round Amplification

[0374] For each reaction, add 12.5 μl of PCR Master Mix (for example, Promega Master Mix) and 9.5 μl water (molecular biology grade) in the High-Risk PCR plate provided. If you are setting up 96 samples combine 1.25 ml Master mix, 850 μl of water and 200 μl of primer mix in an appropriate tube and mix well. Then using a multi channel pipette add 23 μl of the reaction mix to each well in the High-Risk HPV plate (Plate 6) provided.
[0375] Add 2 μl of Control Primers 3A to the appropriate well to control well H10 and H11.
[0376] Add 2 μl of the required modified DNA from the Elution plate (Plate 5) to the High-Risk HPV plate (Plate 6) provided and 2 μl of Control Sample 2 to well H11 then store the remainder at −20° C. for subsequent HPV typing (see below for High-Risk plate lay-out).
[0377] Run the following PCR program.

| | |
|---|---|
| 95° C./3 min | 1 cycle |
| 95° C./1 min | 30 cycles |
| 42° C./2 min | |
| 60° C./2 min | |
| 60° C./10 min | 1 cycle |

### Second Round Amplification

[0378] Add 2 μl of the first round amplified DNA to second round mixes, prepared exactly the same as for the first round amplifications.
[0379] Run the following PCR program

| | |
|---|---|
| 95° C./3 min | 1 cycle |
| 95° C./1 min | 30 cycles |
| 42° C./2 min | |
| 60° C./2 min | |
| 60° C./10 min | 1 cycle |

### Electrophoresis

[0380] Remove the 96 well 2% E-gel from the foil wrapper and remove the red 96 well comb.
[0381] Add 10 μl of sterile water to each well of the gel using a multi-channel pipette.
[0382] Add 10 μl of DNA marker to the marker wells.
[0383] Transfer 10 μl of amplified product to each well of the E-gel using a multichannel pipette.
[0384] Set the E-base for 5-7 minutes and press pwr/prg.
[0385] Record the results using an UV transilluminator and gel documentation software.

### HPV Typing

### First Round Amplification

[0386] The High-Risk Typing plate (Plate 8) contains strain specific primers directed against the following high-risk HPV types: 16, 18, 31, 33, 35, 39, 45, 51, 52, 56, 58, 59 and 68. There is sufficient DNA remaining in the Elution plate (Plate 5) to type each sample for all high-risk strains.
[0387] Remove the Elution plate (Plate 5) from the −20° C. freezer.
[0388] Any samples positive by the high-risk universal amplification can now be typed using the strain specific primers (see below for typing plate set-up)
[0389] For each reaction, add 12.5 μl of PCR Master Mix (for example, Promega Master Mix) and 8.5 μl water into each well of the PCR plate provided. If you have 6 samples to type add 1187.5 μl of Master Mix and 807.5 μl of water into an appropriate tube, mix well then add 21 μl to each well of the HPV Typing plate (Plate 7) as indicated below.
[0390] Add 2 μl of the appropriate primer set to each well as indicated below.
[0391] If the typing is being carried out in 384 well format and 24 samples are available for typing add 4.5 ml of Master Mix and 3.42 ml of water into an appropriate tube, mix well then add 21 μl to each well of the 384 well plate as indicated below. Then add 2 μl of the appropriate primer set to each well as indicated below.
[0392] Add 2 μl of High-Risk positive sample (from Elution plate, Plate 5) to the appropriate wells of the typing plate.
[0393] Set up sufficient tubes for each of your samples and a ‘no template’ (negative) control.
[0394] Run the following PCR program.

| | |
|---|---|
| 95° C./3 min | 1 cycle |
| 95° C./1 min | 30 cycles |
| 45° C./2 min | |
| 65° C./2 min | |
| 65° C./10 min | 1 cycle |

### Second Round Amplification

[0395] Add 2 μl of the First round amplified DNA to Second round mixes, prepared exactly the same as for the First round amplifications.
[0396] Run the following PCR program

| | |
|---|---|
| 95° C./3 min | 1 cycle |
| 95° C./1 min | 30 cycles |
| 45° C./2 min | |
| 65° C./2 min | |
| 65° C./10 min | 1 cycle |

### Electrophoresis

[0397] Remove the 96 well 2% E-gel from the foil wrapper and remove the red 96 well comb.
[0398] Add 10 μl of sterile water to each well of the gel using a multi-channel pipette.
[0399] Add 10 μl of DNA marker to the marker wells.
[0400] Transfer 10 μl of amplified product to each well of the E-gel using a multichannel pipette.
[0401] Set the E-base for 5-7 minutes and press run.
[0402] Record the results using an UV transilluminator and gel documentation software.
[0403] The sample has now been typed.

Troubleshooting

| PROBLEMS | POSSIBLE SOLUTIONS |
|---|---|
| No PCR product was | PCR has failed - make sure all the |
| found for any sample | components were added to the tube and |
| | that the PCR cycle was correct. |
| | Confirm that the polymerase is within its |
| | storage date and that it retains its activity. |
| No PCR product was | Modification has failed - check that the |
| found for any sample | NaOH solution was fresh and that |
| except for Control | combined Reagent # 1 and Reagent 2 was |
| Sample 2 | no older than 4 weeks. |
| | Make sure that all the steps in the |
| | modification and clean up protocols were |
| | followed. |
| | DNA was degraded during modification - |
| | check that all reagents and tubes used |
| | during the procedure were of molecular |
| | biology quality (ie DNase free). |
| | Modification was incomplete. Return the |
| | samples to 95° C. for a further 15 minutes. |
| | Sample DNA was degraded before |
| | modification- check that the DNA has been |
| | stored/handled correctly. |
| PCR products were | Check that the DNA concentration is not |
| present only in the | too dilute. |
| control reactions | Check that the PCR-grade water and not |
| | the template was added to the negative |
| | control. |
| PCR products were | Make sure that the PCR is being set up in |
| present in all the | a separate area with dedicated reagents |
| lanes including the | and equipment to prevent cross |
| ‘no-template’ | contamination. |
| (negative) control | |

[0404] Bisulfite-treated HPV DNA from sources, when amplified using genomically simplified primers, be they oligonucleotides or modified nucleic acids such as INAs provide an unsurpassed detection system for finding HPV of any type within a sample, be that sample from human clinical material or at another extreme from an environmental source. The present invention has been developed for a clinically relevant virus (HPV) believed to be causative for a human cancer.

[0405] The practical implications of the detection assay according to the present invention can be varied. While the principles described in detail above have been demonstrated using PCR for amplification, readouts can be engaged via any methodology known in the art. With the current emphasis on microarray detection systems, one would be able to detect a great diversity of HPV using genomically simplified DNA since the bisulfite treatment reduces the genomic complexity and hence allows for more types of HPV to be tested on microarrays with a smaller number of detectors (features).

[0406] In summary, the HGS genomically simplified primer methodology yields consistent data sets that has been correlated with the clinical phenotypes of a number of patients.

[0407] It will be appreciated by persons skilled in the art that numerous variations and/or modifications may be made to the invention as shown in the specific embodiments without departing from the spirit or scope of the invention as broadly described. The present embodiments are, therefore, to be considered in all respects as illustrative and not restrictive.

1. An assay for detecting human papilloma virus (HPV) comprising:
treating the viral nucleic acid with an agent that modifies cytosine to form derivative viral nucleic acid;
amplifying at least a part of the derivative viral nucleic acid to form an HPV-specific nucleic acid molecule; and
looking for the presence of an HPV-specific nucleic acid molecule, wherein detection of the HPV-specific nucleic acid molecule is indicative of HPV.

2. The assay according to claim 1 further comprising:
providing HPV primers capable of allowing amplification of an HPV-specific nucleic acid molecule.

3. The assay according to claim 1 or 2 wherein the virus is in a sample selected from the group consisting of swab, biopsy, smear, Pap smear, blood, plasma, serum, blood product, surface scrape, spatula, liquid suspension, frozen material, paraffin blocks, glass slides, forensic collection systems and archival material.

4. The assay according to claim 3 wherein the sample is smear, Pap smear or liquid suspension of cells.

5. The assay according to any one of claims 1 to 4 wherein the agent modifies cytosine to form uracil in the derivative nucleic acid.

6. The assay according to claim 5 wherein the agent is selected from bisulfite, acetate or citrate.

7. The assay according to claim 6 wherein the agent is sodium bisulfite.

8. The assay according to any one of claims 1 to 7 wherein the agent modifies an cytosine to a uracil in each strand of complementary double stranded viral nucleic acid forming two derivative but non-complementary viral nucleic acid molecules.

9. The assay according to any one of claims 1 to 8 wherein the derivative viral nucleic acid has a reduced total number of cytosines compared with the corresponding untreated viral nucleic acid.

10. The assay according to any one of claims 1 to 9 wherein the amplification is carried out by polymerase chain reaction (PCR), ligase chain reaction (LCR), isothermal amplification, signal amplification or combination thereof.

11. The assay according to claim 10 wherein the amplification is carried out by PCR.

12. The assay according to any one of claims 1 to 11 wherein amplification forms an HPV-specific nucleic acid molecule that does not form part of a natural HPV genome.

13. The assay according to any one of claims 1 to 12 wherein the HPV-specific nucleic acid molecule is specific for an HPV species, a type of HPV or sub-type of HPV.

14. The assay according to claim 13 wherein the HPV type can confer a high, medium or low level oncogenic status on a given tissue in a particular human ethnic lineage.

15. The assay according to claim 14 wherein high risk HPV types are HPV16, 18, 45 and 56, medium risk HPV types are HPV31, 33, 35, 39, 51, 52, 56, 58, 59 and 68, and low risk types are HPV6, 11, 26, 30, 40, 42, 43, 44, 53, 54, 55, 66, 73, 82, 83 and 84.

16. The assay according to claim 15 wherein HPV16, 18, 31, 33, 35, 39, 45, 51, 52, 56, 58, 59 and 68 are detected.

17. The assay according to any one of claims 1 to 16 wherein the HPV-specific nucleic acid is detected by gel electrophoresis, hybridisation with labelled probes, use of tagged primers that allow subsequent identification, an enzyme linked assay, or use of fluorescently-tagged primers that give rise to a signal upon hybridisation with the target DNA.

18. An HPV primer or probe comprising one or more of SEQ ID NO: 1 to SEQ ID NO: 516.

19. The HPV primer or probe according to claim 18 for detecting high-risk HPV strains comprising one or more of SEQ ID NO: 333 to SEQ ID NO: 350.

20. The HPV primer or probe according to claim 18 for detecting HPV comprising SEQ ID NO: 462, SEQ ID NO: 479, SEQ ID. NO: 463, SEQ ID NO: 478, SEQ ID NO: 470, SEQ ID NO: 485, and SEQ ID NO: 486.

21. A kit for the detection of HPV comprising two or more HPV primers or probes according to any one of claims 18 to 20 together with suitable reagent or diluent.

22. A derivative HPV nucleic acid comprising at least 15 nucleotides as herein before defined.

23. The derivative HPV nucleic acid according to claim 22 comprising high-risk HPV16, 18, 45 or 56.

24. The derivative HPV nucleic acid according to claim 22 comprising medium risk HPV 31, 33, 35, 39, 51, 52, 58, 59 and 68.

25. The derivative HPV nucleic add according to claim 23 or 24 comprising SEQ ID NO: 614, SEQ ID NO: 617, SEQ ID NO: 620, SEQ ID NO: 623, SEQ ID NO: 626, SEQ ID NO: 629, SEQ ID NO: 632, SEQ ID NO: 635, SEQ ID NO: 638, SEQ ID NO: 641, SEQ ID NO: 644, SEQ ID NO: 647, SEQ ID NO: 650, SEQ ID NO: 653, SEQ ID NO: 656, SEQ ID NO: 659, SEQ ID NO: 662, SEQ ID NO: 665, SEQ ID NO: 668, SEQ ID NO: 671, SEQ ID NO: 674, SEQ ID NO: 677, SEQ ID NO: 680, SEQ ID NO: 683, SEQ ID NO: 686, or SEQ ID NO: 689, parts thereof comprising at least 15 nucleotides, and nucleic acid molecules capable of hybridizing under stringent conditions to SEQ ID NO: 614, SEQ ID NO: 617, SEQ ID NO: 620, SEQ ID NO: 623, SEQ ID NO: 626, SEQ ID NO: 629, SEQ ID NO: 632, SEQ ID NO: 635, SEQ ID NO: 638, SEQ ID NO: 641, SEQ ID NO: 644, SEQ ID NO: 647, SEQ ID NO: 650, SEQ ID NO: 653, SEQ ID NO: 656, SEQ ID NO: 659, SEQ ID NO: 662, SEQ ID NO: 665, SEQ ID NO: 668, SEQ ID NO: 671, SEQ ID NO: 674, SEQ ID NO: 677, SEQ ID NO: 680, SEQ ID NO: 683, SEQ ID NO: 686, or SEQ ID NO: 689.

26. A simplified HPV nucleic acid comprising at least 15 nucleotides as herein before defined.

27. The simplified HPV nucleic acid according to claim 26 comprising high-risk HPV16, 18, 45 or 56.

28. The simplified HPV nucleic acid according to claim 26 being medium risk HPV 31, 33, 35, 39, 51, 52, 58, 59 and 68.

29. The simplified HPV nucleic acid according to claim 27 or 28 comprising SEQ ID NO: 615, SEQ ID NO: 618, SEQ ID NO: 621, SEQ ID NO: 624, SEQ ID NO: 627, SEQ ID NO: 630, SEQ ID NO: 633, SEQ ID NO: 636, SEQ ID NO: 639, SEQ ID NO: 642, SEQ ID NO: 645, SEQ ID NO: 648, SEQ ID NO: 651, SEQ ID NO: 654, SEQ ID NO: 657, SEQ ID NO: 660, SEQ ID NO: 663, SEQ ID NO: 666, SEQ ID NO: 669, SEQ ID NO: 672, SEQ ID NO: 675, SEQ ID NO: 678, SEQ ID NO: 681, SEQ ID NO: 684, SEQ ID NO: 687, or SEQ ID NO: 690; parts thereof comprising at least 15 nucleotides, and nucleic acid molecules capable of hybridizing under stringent conditions to SEQ ID NO: 615, SEQ ID NO: 618, SEQ ID NO: 621, SEQ ID NO: 624, SEQ ID NO: 627, SEQ ID NO: 630, SEQ ID NO: 633, SEQ ID NO: 636, SEQ ID NO: 639, SEQ ID NO: 642, SEQ ID NO: 645, SEQ ID NO: 648, SEQ ID NO: 651, SEQ ID NO: 654, SEQ ID NO: 657, SEQ ID NO: 660, SEQ ID NO: 663, SEQ ID NO: 666, SEQ ID NO: 669, SEQ ID NO: 672, SEQ ID NO: 675, SEQ ID NO: 678, SEQ ID NO: 681, SEQ ID NO: 684, SEQ ID NO: 687, or SEQ ID NO: 690.

30. Use of the derivative or simplified HPV nucleic acid according to any one of claims 22 to 29 to obtain probes, primers or nucleic acid sequences for HPV detection.

31. An assay for detecting the presence of HPV in a sample comprising:
obtaining viral nucleic acid from a sample;
treating the viral nucleic acid with bisulphite under conditions that cause cytosines in the viral nucleic acid to be converted to uracil to form derivative viral nucleic acid;
providing primers capable of binding to regions of derivative viral nucleic acid, the primers being capable of allowing amplification of a desired HPV-specific nucleic acid molecule to the derivative viral nucleic acid;
carrying out an amplification reaction on the derivative viral nucleic acid; and
looking for the presence of a desired amplified nucleic acid product, wherein detection of the amplified product is indicative of the presence of HPV in the sample.

32. The assay according to claim 31 further comprising:
treating a sample having HPV present with an additional test which can determine the type, subtype, variant or genotype of HPV in the sample.

The application's sequence listing, which the Patent Office published only in electronic form, follows.

SEQUENCE LISTING (711 sequences)

SEQ ID NO: 1 - DNA, 26 bp, Papilloma virus
attattgggaagtatgttatggtagt

SEQ ID NO: 2 - DNA, 23 bp, Papilloma virus
gtttttttgtatttgtatttagt

SEQ ID NO: 3 - DNA, 23 bp, Papilloma virus
tacttattataattatcaataac

SEQ ID NO: 4 - DNA, 27 bp, Papilloma virus
aaatcaccttacaattacactataaac

SEQ ID NO: 5 - DNA, 23 bp, Papilloma virus
gttatgagtaattagaagatagt

SEQ ID NO: 6 - DNA, 23 bp, Papilloma virus
attattaaatattgatttgttgt

SEQ ID NO: 7 - DNA, 26 bp, Papilloma virus
atacctataatatactctactataac

SEQ ID NO: 8 - DNA, 25 bp, Papilloma virus
caaaattttatataatatacctatc

SEQ ID NO: 9 - DNA, 31 bp, Papilloma virus
gaatatattttgtgtagtttaaagatgatgt

SEQ ID NO: 10 - DNA, 23 bp, Papilloma virus
gttttatatttgtgtttagtagt

SEQ ID NO: 11 - DNA, 31 bp, Papilloma virus
ccttttaaatatactataaatataatattac

SEQ ID NO: 12 - DNA, 24 bp, Papilloma virus
cacacaatatacaatatacaatac

SEQ ID NO: 13 - DNA, 26 bp, Papilloma virus
gtttatatgataaattttgatattgt

SEQ ID NO: 14 - DNA, 23 bp, Papilloma virus
ttgtgtgtttttgtgtgtttgtt

SEQ ID NO: 15 - DNA, 25 bp, Papilloma virus
atattaaaaataataatatataaac

SEQ ID NO: 16 - DNA, 24 bp, Papilloma virus
atatataacaattacattatatac

SEQ ID NO: 17 - DNA, 27 bp, Papilloma virus
gaaagttattatagttatgtatagagt

SEQ ID NO: 18 - DNA, 26 bp, Papilloma virus
attagaatgtgtgtattgtaagtaat

SEQ ID NO: 19 - DNA, 26 bp, Papilloma virus
actacaatataaatatatctccatac

SEQ ID NO: 20 - DNA, 25 bp, Papilloma virus
aaactatcatttaattactcataac

SEQ ID NO: 21 - DNA, 26 bp, Papilloma virus
tatgtatggagatatatttatattgt

SEQ ID NO: 22 - DNA, 25 bp, Papilloma virus
gttatgagtaattaaatgatagttt

SEQ ID NO: 23 - DNA, 24 bp, Papilloma virus
taaaacacacaattcctaatatac

SEQ ID NO: 24 - DNA, 24 bp, Papilloma virus
cccattaatacctacaaaatcaac

SEQ ID NO: 25 - DNA, 25 bp, Papilloma virus
gggaatataggtaagtgggaagtat

SEQ ID NO: 26 - DNA, 27 bp, Papilloma virus
gattgtaatgattttatgtgtagtatt

SEQ ID NO: 27 - DNA, 24 bp, Papilloma virus
aaataatatatctctataataatc

SEQ ID NO: 28 - DNA, 26 bp, Papilloma virus
ttcattacctacacctatccaatacc

SEQ ID NO: 29 - DNA, 23 bp, Papilloma virus
atatgataatgtaatatatatgt

SEQ ID NO: 30 - DNA, 24 bp, Papilloma virus
gtgtatgtatgtatgtgtgttgtt

SEQ ID NO: 31 - DNA, 26 bp, Papilloma virus
catatatatacaataataacataaac

SEQ ID NO: 32 - DNA, 25 bp, Papilloma virus
caacctatacaattactataaaaac

SEQ ID NO: 33 - DNA, 25 bp, Papilloma virus
gatagtatatagtatgttgtatgtt

SEQ ID NO: 34 - DNA, 25 bp, Papilloma virus
atttagattttgtgtatggagatat

SEQ ID NO: 35 - DNA, 28 bp, Papilloma virus
atcttacaatattaccttaaatccatac

SEQ ID NO: 36 - DNA, 26 bp, Papilloma virus
aaatttcattttaaaactctaaatac

SEQ ID NO: 37 - DNA, 28 bp, Papilloma virus
gtatggatttaaggtaatattgtaagat

SEQ ID NO: 38 - DNA, 26 bp, Papilloma virus
gtatttagagttttaaaatgaaattt

SEQ ID NO: 39 - DNA, 23 bp, Papilloma virus
aacacacaaaaaacaaaatattc

SEQ ID NO: 40 - DNA, 26 bp, Papilloma virus
accattattacttactactaaaatac

SEQ ID NO: 41 - DNA, 21 bp, Papilloma virus
gtatttagtatttgtagtagt

SEQ ID NO: 42 - DNA, 22 bp, Papilloma virus
ttattgttaaaattgttgagtt

SEQ ID NO: 43 - DNA, 21 bp, Papilloma virus
aataataacctccacttatac

SEQ ID NO: 44 - DNA, 26 bp, Papilloma virus
aaatatactataaacacaatttaatc

SEQ ID NO: 45 - DNA, 27 bp, Papilloma virus
gtttgaatattattttgtaaaatttgt

SEQ ID NO: 46 - DNA, 26 bp, Papilloma virus
tattgtaaggaaattttataatgggt

SEQ ID NO: 47 - DNA, 27 bp, Papilloma virus
ctttatttttcttctaaccccaataac

SEQ ID NO: 48 - DNA, 26 bp, Papilloma virus
atacacaaccctttccactaccctac

SEQ ID NO: 49 - DNA, 25 bp, Papilloma virus
gaaatataagtgtaaagaataatgt

SEQ ID NO: 50 - DNA, 27 bp, Papilloma virus
gaataattggattatgaataatttgat

SEQ ID NO: 51 - DNA, 24 bp, Papilloma virus
tcttccattaacatctactccaac

SEQ ID NO: 52 - DNA, 23 bp, Papilloma virus
ttactatacaacacactaataac

SEQ ID NO: 53 - DNA, 23 bp, Papilloma virus
gtataaaggtatatgggaagtgt

SEQ ID NO: 54 - DNA, 26 bp, Papilloma virus
gattttgtgtttagtatttttagatt

SEQ ID NO: 55 - DNA, 25 bp, Papilloma virus
catataactccaccaaaacactatc

SEQ ID NO: 56 - DNA, 25 bp, Papilloma virus
tctatttaattcaccttttaaatac

SEQ ID NO: 57 - DNA, 25 bp, Papilloma virus
gtatagtttatagaaagggagtgat

SEQ ID NO: 58 - DNA, 27 bp, Papilloma virus
gtattaaayggatagtgtatttatggt

SEQ ID NO: 59 - DNA, 20 bp, Papilloma virus
tacacactacatataaacta

SEQ ID NO: 60 - DNA, 26 bp, Papilloma virus
cccatacaataaataattataatatc

SEQ ID NO: 61 - DNA, 25 bp, Papilloma virus
gataatttatagaagtagttatagt

SEQ ID NO: 62 - DNA, 24 bp, Papilloma virus
ttttgttatttaattaatatatag

SEQ ID NO: 63 - DNA, 23 bp, Papilloma virus
cccatctaaatctaatactatac

SEQ ID NO: 64 - DNA, 27 bp, Papilloma virus
ctatattattattacattactattatc

SEQ ID NO: 65 - DNA, 20 bp, Papilloma virus
tttttgaatttgtatttagt

SEQ ID NO: 66 - DNA, 24 bp, Papilloma virus
gaattaaatatttttatagtaagt

SEQ ID NO: 67 - DNA, 26 bp, Papilloma virus
attttttgttgggattgttataaagt

SEQ ID NO: 68 - DNA, 24 bp, Papilloma virus
gtgttattatttgtgtgttttgtt

SEQ ID NO: 69 - DNA, 26 bp, Papilloma virus
tcaataaccccacaattaacactatc

SEQ ID NO: 70 - DNA, 22 bp, Papilloma virus
ataataaaatatatataaacac

SEQ ID NO: 71 - DNA, 26 bp, Papilloma virus
cttatttaatttatacatacaactac

SEQ ID NO: 72 - DNA, 24 bp, Papilloma virus
aaaaaatacatatatataaattac

SEQ ID NO: 73 - DNA, 26 bp, Papilloma virus
tttagtataaaaaagtagggagtgat

SEQ ID NO: 74 - DNA, 28 bp, Papilloma virus
ggtatataaagtatatagtattttgtgt

SEQ ID NO: 75 - DNA, 25 bp, Papilloma virus
aatcttaaacattttatacacactc

SEQ ID NO: 76 - DNA, 27 bp, Papilloma virus
cacactatatctataccatctaaattc

SEQ ID NO: 77 - DNA, 25 bp, Papilloma virus
gtaattgatttttattgttatgagt

SEQ ID NO: 78 - DNA, 26 bp, Papilloma virus
gttatagatagtttagttggataagt

SEQ ID NO: 79 - DNA, 26 bp, Papilloma virus
ctaaatcaaccattataattacaatc

SEQ ID NO: 80 - DNA, 23 bp, Papilloma virus
cctatctatctatcaattactac

SEQ ID NO: 81 - DNA, 25 bp, Papilloma virus
gtgggtggttaggtaattgtttgtt

SEQ ID NO: 82 - DNA, 22 bp, Papilloma virus
gtaaaaatattatttattgtgt

SEQ ID NO: 83 - DNA, 24 bp, Papilloma virus
ttaaatatttattattgaaattgt

SEQ ID NO: 84 - DNA, 25 bp, Papilloma virus
gtgtatattataagttaatatgtgt

SEQ ID NO: 85 - DNA, 23 bp, Papilloma virus
ccttttaaatacactataaatac

SEQ ID NO: 86 - DNA, 27 bp, Papilloma virus
aaaaatcccacaaacacccaaaacaac

SEQ ID NO: 87 - DNA, 24 bp, Papilloma virus
ctaatccaataccaaataaataac

SEQ ID NO: 88 - DNA, 26 bp, Papilloma virus
tactcttattatatcatatactatac

SEQ ID NO: 89 - DNA, 24 bp, Papilloma virus
gtatatataaagtaaatattttgt

SEQ ID NO: 90 - DNA, 26 bp, Papilloma virus
ggtattgtaygattatgttttaagat

SEQ ID NO: 91 - DNA, 25 bp, Papilloma virus
ctctatatacaactattaaatctac

SEQ ID NO: 92 - DNA, 25 bp, Papilloma virus
ccatatacaaaataattataatatc

SEQ ID NO: 93 - DNA, 26 bp, Papilloma virus
ttttgtatatggaaatatattagaat

SEQ ID NO: 94 - DNA, 24 bp, Papilloma virus
taggtgtattatatgttaaagatt

SEQ ID NO: 95 - DNA, 26 bp, Papilloma virus
cctcatctaaactatcacttaattac

SEQ ID NO: 96 - DNA, 26 bp, Papilloma virus
taactaattatacttatccatctaac

SEQ ID NO: 97 - DNA, 24 bp, Papilloma virus
gggtggttaggtaattgtttgttt

SEQ ID NO: 98 - DNA, 24 bp, Papilloma virus
ggatatatgtttatatgatagatt

SEQ ID NO: 99 - DNA, 26 bp, Papilloma virus
atttattgttgaaattgttatatagt

SEQ ID NO: 100 - DNA, 22 bp, Papilloma virus
atagtttttagtattgtgttgt

SEQ ID NO: 101 - DNA, 25 bp, Papilloma virus
caaatataaaataaacccctctatc

SEQ ID NO: 102 - DNA, 27 bp, Papilloma virus
caattactatactaccaaatattatac

SEQ ID NO: 103 - DNA, 23 bp, Papilloma virus
atatactataaatataattatac

SEQ ID NO: 104 - DNA, 27 bp, Papilloma virus
ccaccatacacacatattacacaatac

SEQ ID NO: 105 - DNA, 23 bp, Papilloma virus
ggttgttataaaagtagaagtgt

SEQ ID NO: 106 - DNA, 24 bp, Papilloma virus
aaaagtagaagtggatagatattg

SEQ ID NO: 107 - DNA, 24 bp, Papilloma virus
acacaaatcataacatacaaaatc

SEQ ID NO: 108 - DNA, 23 bp, Papilloma virus
atacatactccatataactaacc

SEQ ID NO: 109 - DNA, 25 bp, Papilloma virus
aaataatgtaataaatagttatgtt

SEQ ID NO: 110 - DNA, 26 bp, Papilloma virus
gttgtgtttagttgaaaagtaaagat

SEQ ID NO: 111 - DNA, 27 bp, Papilloma virus
ccatatatatactctatacacacaaac

SEQ ID NO: 112 - DNA, 22 bp, Papilloma virus
aaacacactattccaaatatac

SEQ ID NO: 113 - DNA, 26 bp, Papilloma virus
gtaaatgggaagtgtattataatggt

SEQ ID NO: 114 - DNA, 25 bp, Papilloma virus
aatttattgttttgattttatgtgt

SEQ ID NO: 115 - DNA, 23 bp, Papilloma virus
aattattaaaataatccaaaaac

SEQ ID NO: 116 - DNA, 23 bp, Papilloma virus
taatattaccacaactaaaatac

SEQ ID NO: 117 - DNA, 26 bp, Papilloma virus
gtatatgttttattgggttatatgat

SEQ ID NO: 118 - DNA, 23 bp, Papilloma virus
gtatatatatatgttgtaatgtt

SEQ ID NO: 119 - DNA, 23 bp, Papilloma virus
atctatacaacaaccacataaac

SEQ ID NO: 120 - DNA, 23 bp, Papilloma virus
caatactatatcatatccattac

SEQ ID NO: 121 - DNA, 22 bp, Papilloma virus
tttataatattttataagtatt

SEQ ID NO: 122 - DNA, 20 bp, Papilloma virus
gtttaaaaaaagggagtaat

SEQ ID NO: 123 - DNA, 26 bp, Papilloma virus
cataattaacatacaactaataattc

SEQ ID NO: 124 - DNA, 23 bp, Papilloma virus
attatattttctaatataattac

SEQ ID NO: 125 - DNA, 25 bp, Papilloma virus
ttaaagtttattttgtaggaaattg

SEQ ID NO: 126 - DNA, 28 bp, Papilloma virus
gatttatgtttttataatgaaatatagt

SEQ ID NO: 127 - DNA, 23 bp, Papilloma virus
ctaataaatccataaacaactac

SEQ ID NO: 128 - DNA, 27 bp, Papilloma virus
cataacaaattactaatttacatttac

SEQ ID NO: 129 - DNA, 24 bp, Papilloma virus
atgtagattttgtaaaggaagtat

SEQ ID NO: 130 - DNA, 23 bp, Papilloma virus
ggattatttattgttgagattgt

SEQ ID NO: 131 - DNA, 27 bp, Papilloma virus
cctatacccrttattactttcaaaatc

SEQ ID NO: 132 - DNA, 24 bp, Papilloma virus
tctaaaacactttaaacaattaac

SEQ ID NO: 133 - DNA, 28 bp, Papilloma virus
gattttgtatgaattgtgtgattagtgt

SEQ ID NO: 134 - DNA, 27 bp, Papilloma virus
gttttaaaaatagttgaggtattggtt

SEQ ID NO: 135 - DNA, 23 bp, Papilloma virus
caaaaacttataacacttacaac

SEQ ID NO: 136 - DNA, 26 bp, Papilloma virus
tccaacaatataaacaataccctatc

SEQ ID NO: 137 - DNA, 28 bp, Papilloma virus
gtattttgaatttgtatgtttaaattgt

SEQ ID NO: 138 - DNA, 24 bp, Papilloma virus
gatagtttagatttagaagatgat

SEQ ID NO: 139 - DNA, 26 bp, Papilloma virus
tatataatatacccatcaacaactac

SEQ ID NO: 140 - DNA, 25 bp, Papilloma virus
cactctataactacacaattaaaac

SEQ ID NO: 141 - DNA, 23 bp, Papilloma virus
gtagagatattttttattggatt

SEQ ID NO: 142 - DNA, 21 bp, Papilloma virus
gttggtataataagtgtgtat

SEQ ID NO: 143 - DNA, 26 bp, Papilloma virus
attctaaccccacacaatccaaaatc

SEQ ID NO: 144 - DNA, 23 bp, Papilloma virus
taacctaacttccacaataattc

SEQ ID NO: 145 - DNA, 26 bp, Papilloma virus
gtatatagtggagaaagaaattggat

SEQ ID NO: 146 - DNA, 28 bp, Papilloma virus
gaataataaattagatgtgttttgtgtt

SEQ ID NO: 147 - DNA, 25 bp, Papilloma virus
ccaattattcataacaatacaaatc

SEQ ID NO: 148 - DNA, 22 bp, Papilloma virus
acttaatcatcttcatctaaac

SEQ ID NO: 149 - DNA, 25 bp, Papilloma virus
ttatatatagtatgtgggtaaaagt

SEQ ID NO: 150 - DNA, 22 bp, Papilloma virus
tttttgtatttgtatttagtat

SEQ ID NO: 151 - DNA, 24 bp, Papilloma virus
attataccctctaaaataataatc

SEQ ID NO: 152 - DNA, 27 bp, Papilloma virus
acttcaccttataactatattataaac

SEQ ID NO: 153 - DNA, 25 bp, Papilloma virus
ttatacttgtagtttaaggtgggat

SEQ ID NO: 154 - DNA, 24 bp, Papilloma virus
ttatagtttgtggggtataatgat

SEQ ID NO: 155 - DNA, 24 bp, Papilloma virus
ttttccataaaactataaacaaac

SEQ ID NO: 156 - DNA, 24 bp, Papilloma virus
tataacacttacaacatctaatac

SEQ ID NO: 157 - DNA, 23 bp, Papilloma virus
gtatagtatattgtgtaaaaggt

SEQ ID NO: 158 - DNA, 25 bp, Papilloma virus
ttgtttatattgttggaaattatgt

SEQ ID NO: 159 - DNA, 25 bp, Papilloma virus
cttaatatcactatcaaaacactac

SEQ ID NO: 160 - DNA, 24 bp, Papilloma virus
ttttaatatacccaacaacaaatc

SEQ ID NO: 161 - DNA, 23 bp, Papilloma virus
gaygtatttattgttgggtttgt

SEQ ID NO: 162 - DNA, 25 bp, Papilloma virus
ggttttatttatattgtttattggt

SEQ ID NO: 163 - DNA, 22 bp, Papilloma virus
tacctatacaataattattatc

SEQ ID NO: 164 - DNA, 24 bp, Papilloma virus
tcaccttataattaaactacaaac

SEQ ID NO: 165 - DNA, 27 bp, Papilloma virus
ggaaattttttatttgtagtttgtgtt

SEQ ID NO: 166 - DNA, 26 bp, Papilloma virus
ataaggtaaggttaattaatttaggt

SEQ ID NO: 167 - DNA, 26 bp, Papilloma virus
cctttaaaataatataatttccatac

SEQ ID NO: 168 - DNA, 24 bp, Papilloma virus
cctacaaaatcaaaaaattccaac

SEQ ID NO: 169 - DNA, 22 bp, Papilloma virus
gtgggaagtataatatgggggt

SEQ ID NO: 170 - DNA, 23 bp, Papilloma virus
gtaatgattttatgtgtagtatt

SEQ ID NO: 171 - DNA, 26 bp, Papilloma virus
tattacttatacttaaacacaaaaac

SEQ ID NO: 172 - DNA, 26 bp, Papilloma virus
tatcaccttttaaatatattataaac

SEQ ID NO: 173 - DNA, 24 bp, Papilloma virus
atattatataaaaaagggtgtaat

SEQ ID NO: 174 - DNA, 27 bp, Papilloma virus
gtatataaaagttttgtggaaaagtgt

SEQ ID NO: 175 - DNA, 26 bp, Papilloma virus
tacactatacataaatctttaaaaac

SEQ ID NO: 176 - DNA, 25 bp, Papilloma virus
tacatttataacatacaacatatac

SEQ ID NO: 177 - DNA, 27 bp, Papilloma virus
gtaagaaattgtattgtatttggaatt

SEQ ID NO: 178 - DNA, 27 bp, Papilloma virus
gtaagaaattgtattgtatttggaatt

SEQ ID NO: 179 - DNA, 25 bp, Papilloma virus
gaatgaattagattttgttgatttg

SEQ ID NO: 180 - DNA, 25 bp, Papilloma virus
gaatgaattagattttgttgatttg

SEQ ID NO: 181 - DNA, 24 bp, Papilloma virus
caactactataatattctaaaatc

SEQ ID NO: 182 - DNA, 24 bp, Papilloma virus
caactactataatattctaaaatc

SEQ ID NO: 183 - DNA, 23 bp, Papilloma virus
aacacacaaaaaacaaaatactc

SEQ ID NO: 184 - DNA, 23 bp, Papilloma virus
aacacacaaaaaacaaaatactc

SEQ ID NO: 185 - DNA, 26 bp, Papilloma virus
tatatggggtataatagtgggaggtt

SEQ ID NO: 186 - DNA, 26 bp, Papilloma virus
gttttgaatatgtatttagtatttgt

SEQ ID NO: 187 - DNA, 25 bp, Papilloma virus
ctttaataccctccaatattaatac

SEQ ID NO: 188 - DNA, 24 bp, Papilloma virus
caatttatatcaccttttaaatac

SEQ ID NO: 189 - DNA, 25 bp, Papilloma virus
ttgtgtatggtattatattagaggt

SEQ ID NO: 190 - DNA, 22 bp, Papilloma virus
gatgttaaagattatttgggtt

SEQ ID NO: 191 - DNA, 21 bp, Papilloma virus
tcctctaaactatcaaattac

SEQ ID NO: 192 - DNA, 25 bp, Papilloma virus
caacccrtctttctaataactaatc

SEQ ID NO: 193 - DNA, 26 bp, Papilloma virus
ggtggttaggtaattgtttgttttgt

SEQ ID NO: 194 - DNA, 24 bp, Papilloma virus
attgaaattgttgtttatttatgt

SEQ ID NO: 195 - DNA, 28 bp, Papilloma virus
ctttatttatacactcaattacaataac

SEQ ID NO: 196 - DNA, 25 bp, Papilloma virus
taaatacaatacaaattatatatac

SEQ ID NO: 197 - DNA, 24 bp, Papilloma virus
tttgaaataattgatttatattgt

SEQ ID NO: 198 - DNA, 20 bp, Papilloma virus
atgagtaattaggtgatagt

SEQ ID NO: 199 - DNA, 25 bp, Papilloma virus
ctataccttcaaaatcctccattac

SEQ ID NO: 200 - DNA, 24 bp, Papilloma virus
ttattacctctacttcaaaccaac

SEQ ID NO: 201 - DNA, 27 bp, Papilloma virus
tatgggaaaataaagtatttattgttt

SEQ ID NO: 202 - DNA, 26 bp, Papilloma virus
gattttgtgtttagtatttttagatt

SEQ ID NO: 203 - DNA, 24 bp, Papilloma virus
atttatattatctatattccttac

SEQ ID NO: 204 - DNA, 25 bp, Papilloma virus
caaatacaatcttataaccactatc

SEQ ID NO: 205 - DNA, 25 bp, Papilloma virus
tagtgtayggggttagtttggaagt

SEQ ID NO: 206 - DNA, 22 bp, Papilloma virus
atttgatttattaataaggtgt

SEQ ID NO: 207 - DNA, 28 bp, Papilloma virus
ctataatatattataaaaatattaatac

SEQ ID NO: 208 - DNA, 24 bp, Papilloma virus
caattactcataacattacaaatc

SEQ ID NO: 209 - DNA, 23 bp, Papilloma virus
gggaggtgygtatgggtagtagt

SEQ ID NO: 210 - DNA, 27 bp, Papilloma virus
ggtattgttgaatatattagattagtt

SEQ ID NO: 211 - DNA, 24 bp, Papilloma virus
ataatatcaccactacttatatac

SEQ ID NO: 212 - DNA, 27 bp, Papilloma virus
cctaaaacattttaatatattaaattc

SEQ ID NO: 213 - DNA, 24 bp, Papilloma virus
aggatttatttgtggtgtggagat

SEQ ID NO: 214 - DNA, 25 bp, Papilloma virus
gtatgtgtattgtgtttagaattgt

SEQ ID NO: 215 - DNA, 26 bp, Papilloma virus
acattataacttccaacaatataaac

SEQ ID NO: 216 - DNA, 25 bp, Papilloma virus
caaaaactatatcctcaattataac

SEQ ID NO: 217 - DNA, 25 bp, Papilloma virus
ggaggtttgtattggtagtagtgtt

SEQ ID NO: 218 - DNA, 22 bp, Papilloma virus
gtatttatatttagtattgtgt

SEQ ID NO: 219 - DNA, 25 bp, Papilloma virus
aataaatattattatttatactatc

SEQ ID NO: 220 - DNA, 27 bp, Papilloma virus
aaatcaccttataattaaactacaaac

SEQ ID NO: 221 - DNA, 25 bp, Papilloma virus
ggttaattaatttaggtattttgat

SEQ ID NO: 222 - DNA, 23 bp, Papilloma virus
gtattaatagtggaagaagagat

SEQ ID NO: 223 - DNA, 24 bp, Papilloma virus
cctacaaaatcaaaaaaatccaac

SEQ ID NO: 224 - DNA, 29 bp, Papilloma virus
aactaattcatccacctcatcctctaaac

SEQ ID NO: 225 - DNA, 26 bp, Papilloma virus
attatatagattttgaataagaggtt

SEQ ID NO: 226 - DNA, 27 bp, Papilloma virus
gaaaatgagagtatttattgttttgat

SEQ ID NO: 227 - DNA, 27 bp, Papilloma virus
attattaatacttctacttctactatc

SEQ ID NO: 228 - DNA, 27 bp, Papilloma virus
aattcaccttttaaatatactacaaac

SEQ ID NO: 229 - DNA, 23 bp, Papilloma virus
tatttttatatattgggagtgat

SEQ ID NO: 230 - DNA, 24 bp, Papilloma virus
ttgtgtggatatatttatggagtt

SEQ ID NO: 231 - DNA, 24 bp, Papilloma virus
cactaattttaattcaatacatac

SEQ ID NO: 232 - DNA, 24 bp, Papilloma virus
caataaacatactctacacactac

SEQ ID NO: 233 - DNA, 30 bp, Papilloma virus
gatttatagtgtaatgagtaattggatagt

SEQ ID NO: 234 - DNA, 30 bp, Papilloma virus; identical to SEQ ID NO: 233

SEQ ID NO: 235 - DNA, 22 bp, Papilloma virus
ggttatagtaagttagataagt

SEQ ID NO: 236 - DNA, 22 bp, Papilloma virus
ggttatagtaagttagataagt

SEQ ID NO: 237 - DNA, 24 bp, Papilloma virus
tccccatctataccttcaaataac

SEQ ID NO: 238 - DNA, 24 bp, Papilloma virus
tccccatctataccttcaaataac

SEQ ID NO: 239 - DNA, 23 bp, Papilloma virus
cctatttttttttctacaattac

SEQ ID NO: 240 - DNA, 23 bp, Papilloma virus
cctatttttttttctacaattac

SEQ ID NO: 241 - DNA, 25 bp, Papilloma virus
ggattttggaatagaggttttgatt

SEQ ID NO: 242 - DNA, 23 bp, Papilloma virus
gtatttgtgtttagtatttaggt

SEQ ID NO: 243 - DNA, 27 bp, Papilloma virus
taaaatcraactattaccactactatc

SEQ ID NO: 244 - DNA, 28 bp, Papilloma virus
tttaacactccacctacccttctctaac

SEQ ID NO: 245 - DNA, 21 bp, Papilloma virus
gttttaggaatatttttttgt

SEQ ID NO: 246 - DNA, 23 bp, Papilloma virus
gtgtagagagtatggtttggagt

SEQ ID NO: 247 - DNA, 27 bp, Papilloma virus
ccaatacctatattatctaaattttac

SEQ ID NO: 248 - DNA, 25 bp, Papilloma virus
caactaaaatataaataatcctatc

SEQ ID NO: 249 - DNA, 20 bp, Papilloma virus
gataatttagaagaagatat

SEQ ID NO: 250 - DNA, 26 bp, Papilloma virus
aattgatagaattagttgtgtaggtt

SEQ ID NO: 251 - DNA, 29 bp, Papilloma virus
cataaattattataacttccacataaaac

SEQ ID NO: 252 - DNA, 27 bp, Papilloma virus
cctcatcctcrtcactaaatacctaac

SEQ ID NO: 253 - DNA, 24 bp, Papilloma virus
gttttatatttatatttagtgatt

SEQ ID NO: 254 - DNA, 26 bp, Papilloma virus
gtaaattataagttaatatgtgttgt

SEQ ID NO: 255 - DNA, 24 bp, Papilloma virus
attgaaattgttgatttaaagatt

SEQ ID NO: 256 - DNA, 26 bp, Papilloma virus
gttttatattgtttttatgtttgtgt

SEQ ID NO: 257 - DNA, 25 bp, Papilloma virus
tacacrataaataaaactttaaaac

SEQ ID NO: 258 - DNA, 26 bp, Papilloma virus
taactttattaaattaaatattatac

SEQ ID NO: 259 - DNA, 24 bp, Papilloma virus
taaacattttaaactatttaaatc

SEQ ID NO: 260 - DNA, 23 bp, Papilloma virus
taccataccaccatatacaaaac

SEQ ID NO: 261 - DNA, 23 bp, Papilloma virus
ttaaattataatgttaaattttg

SEQ ID NO: 262 - DNA, 26 bp, Papilloma virus
gtagatattttttggtaggttattgt

SEQ ID NO: 263 - DNA, 22 bp, Papilloma virus
ttacatactacaaataaatttc

SEQ ID NO: 264 - DNA, 27 bp, Papilloma virus
tatctatactcacttattttaaataac

SEQ ID NO: 265 - DNA, 27 bp, Papilloma virus
tattttgaattaattgatttattttgt

SEQ ID NO: 266 - DNA, 22 bp, Papilloma virus
atgagtaattatgtgatagttt

SEQ ID NO: 267 - DNA, 24 bp, Papilloma virus
atacatatacccataaacaactac

SEQ ID NO: 268 - DNA, 23 bp, Papilloma virus
ttattactatacacaactaaaac

SEQ ID NO: 269 - DNA, 24 bp, Papilloma virus
tatatagattttgaataggaggtt

SEQ ID NO: 270 - DNA, 27 bp, Papilloma virus
gagtatttattgttttgattttgtgtt

SEQ ID NO: 271 - DNA, 21 bp, Papilloma virus
taattttatcaccacaataac

SEQ ID NO: 272 - DNA, 23 bp, Papilloma virus
caccttttaaataaattacaaac

SEQ ID NO: 273 - DNA, 27 bp, Papilloma virus
gtattataaatatttagtgtatggggt

SEQ ID NO: 274 - DNA, 25 bp, Papilloma virus
gttatttgatttattaataaggtgt

SEQ ID NO: 275 - DNA, 26 bp, Papilloma virus
tccaattactcattacattataaatc

SEQ ID NO: 276 - DNA, 22 bp, Papilloma virus
tatattattcaacttatctaac

SEQ ID NO: 277 - DNA, 26 bp, Papilloma virus
aataatgggaagtatgttatggtagt

SEQ ID NO: 278 - DNA, 23 bp, Papilloma virus
tatataagaagtatttatttttg

SEQ ID NO: 279 - DNA, 26 bp, Papilloma virus
tactatcacatccacaacaacaaatc

SEQ ID NO: 280 - DNA, 26 bp, Papilloma virus
ctctaatatctatttctatacactac

SEQ ID NO: 281 - DNA, 25 bp, Papilloma virus
gatattttgattatgttggatatgt

SEQ ID NO: 282 - DNA, 24 bp, Papilloma virus
gttgaagaagaaattaaataagat

SEQ ID NO: 283 - DNA, 26 bp, Papilloma virus
tactatcacatccacaacaacaaatc

SEQ ID NO: 284 - DNA, 26 bp, Papilloma virus
ctctaatatctatttctatacactac

SEQ ID NO: 285 - DNA, 24 bp, Papilloma virus
gggtggttaggtaatatgttgtgt

SEQ ID NO: 286 - DNA, 22 bp, Papilloma virus
tttgaaattgttaatttattgt

SEQ ID NO: 287 - DNA, 24 bp, Papilloma virus
cattatatataatacactaaatac

SEQ ID NO: 288 - DNA, 25 bp, Papilloma virus
actatttttatcaccttttaaatac

SEQ ID NO: 289 - DNA, 23 bp, Papilloma virus
aaatttggattgtgtgttttgtt

SEQ ID NO: 290 - DNA, 26 bp, Papilloma virus
gaaaggataaattatatggtgtatgt

SEQ ID NO: 291 - DNA, 24 bp, Papilloma virus
catacttttacttttccaataaac

SEQ ID NO: 292 - DNA, 24 bp, Papilloma virus
ccacaattacaaataatctccaac

SEQ ID NO: 293 - DNA, 23 bp, Papilloma virus
gtatggaaaaaaaataattttgt

SEQ ID NO: 294 - DNA, 27 bp, Papilloma virus
gattttatatgttaygagttattggat

SEQ ID NO: 295 - DNA, 25 bp, Papilloma virus
cacaatacctaatatacccataaac

SEQ ID NO: 296 - DNA, 23 bp, Papilloma virus
taaatttctaaaacaattaaaac

SEQ ID NO: 297 - DNA, 24 bp, Papilloma virus
gtgtggtaatgtaataatatgttt

SEQ ID NO: 298 - DNA, 23 bp, Papilloma virus
ttttattataattgttgaatagt

SEQ ID NO: 299 - DNA, 24 bp, Papilloma virus
caattttaattacactaaaatacc

SEQ ID NO: 300 - DNA, 26 bp, Papilloma virus
cttaaacattttaaacaatttattac

SEQ ID NO: 301 - DNA, 22 bp, Papilloma virus
gagtagatgtgtataatgtagt

SEQ ID NO: 302 - DNA, 26 bp, Papilloma virus
gttatatgtagtatgtaaaaaatgtt

SEQ ID NO: 303 - DNA, 25 bp, Papilloma virus
caccaccttttacttttcttcaaac

SEQ ID NO: 304 - DNA, 27 bp, Papilloma virus
ttatcttaataattttctacaatttac

SEQ ID NO: 305 - DNA, 23 bp, Papilloma virus
aatttgaaattgatttgtaatgt

SEQ ID NO: 306 - DNA, 22 bp, Papilloma virus
gtgattagttagttagataagt

SEQ ID NO: 307 - DNA, 21 bp, Papilloma virus
cacaccacraacacaccaaac

SEQ ID NO: 308 - DNA, 24 bp, Papilloma virus
ctctataccttcactatccattac

SEQ ID NO: 309 - DNA, 24 bp, Papilloma virus
gattttgtatttagtatttaggat

SEQ ID NO: 310 - DNA, 22 bp, Papilloma virus
tttgttgtaattagtattaggt

SEQ ID NO: 311 - DNA, 27 bp, Papilloma virus
ttatacaaacactatcactactatatc

SEQ ID NO: 312 - DNA, 21 bp, Papilloma virus
attcactatatcccttataac

SEQ ID NO: 313 - DNA, 26 bp, Papilloma virus
gaattaataatagtagaagtgttgtt

SEQ ID NO: 314 - DNA, 23 bp, Papilloma virus
ggagttgtgtattaagtgggatt

SEQ ID NO: 315 - DNA, 25 bp, Papilloma virus
ctcaacracttcaaacacatataac

SEQ ID NO: 316 - DNA, 24 bp, Papilloma virus
tacataataccctacaataacaac

SEQ ID NO: 317 - DNA, 20 bp, Papilloma virus
ggttatatagtaataatagt

SEQ ID NO: 318 - DNA, 23 bp, Papilloma virus
gtaatgaataaggtatagatagt

SEQ ID NO: 319 - DNA, 28 bp, Papilloma virus
ctatatccactacattcaccaaaaaatc

SEQ ID NO: 320 - DNA, 27 bp, Papilloma virus
taaattccccaatcccaatatctatac

SEQ ID NO: 321 - DNA, 23 bp, Papilloma virus
atgtatgygattttgtatttagt

SEQ ID NO: 322 - DNA, 25 bp, Papilloma virus
attgttgaaattgttgtatagttgt

SEQ ID NO: 323 - DNA, 25 bp, Papilloma virus
caattattatttatccttatactac

SEQ ID NO: 324 - DNA, 24 bp, Papilloma virus
taaatataaaacaaatacactatc

SEQ ID NO: 325 - DNA, 24 bp, Papilloma virus
ggaaggygaagtgttggtttttgt

SEQ ID NO: 326 - DNA, 26 bp, Papilloma virus
ggtataattttttttatggggtgtgt

SEQ ID NO: 327 - DNA, 28 bp, Papilloma virus
tccttttcctaataacacaataacttac

SEQ ID NO: 328 - DNA, 25 bp, Papilloma virus
ctatccaactattttataaattaac

SEQ ID NO: 329 - DNA, 26 bp, Papilloma virus
gttgttattttataaaatagttggat

SEQ ID NO: 330 - DNA, 25 bp, Papilloma virus
ggaagtgttgtaattgtagggtaat

SEQ ID NO: 331 - DNA, 28 bp, Papilloma virus
ctttctaaaatcttccactccacaaaac

SEQ ID NO: 332 - DNA, 29 bp, Papilloma virus
taaacactacttccactataaactactac

SEQ ID NO: 333 - DNA, 23 bp, Papilloma virus
gatttdkwdtgtwatgagtaatt

SEQ ID NO: 334 - DNA, 23 bp, Papilloma virus
gatttdtwdtgtwatgagtaatt

SEQ ID NO: 335 - DNA, 17 bp, Papilloma virus
rryrrkttagabgadga

SEQ ID NO: 336 - DNA, 17 bp, Papilloma virus
rrtrrkttagabgadga

SEQ ID NO: 337 - DNA, 17 bp, Papilloma virus
rryrrkttagakgadga

SEQ ID NO: 338 - DNA, 17 bp, Papilloma virus
rrtrrkttagakgadga

SEQ ID NO: 339 - DNA, 22 bp, Papilloma virus
ydatacctwcwmawwhvdccat

SEQ ID NO: 340 - DNA, 22 bp, Papilloma virus
ywatacctwcwmawwhrdccat

SEQ ID NO: 341 - DNA, 22 bp, Papilloma virus
ywatacctwcwaawwhrdccat

SEQ ID NO: 342 - DNA, 22 bp, Papilloma virus
ywatacctwcwmawwmrdccat

SEQ ID NO: 343 - DNA, 22 bp, Papilloma virus
ywatacctwcwmawwhvdccat

SEQ ID NO: 344 - DNA, 23 bp, Papilloma virus
achwmaaaccahccwhwacahcc

SEQ ID NO: 345 - DNA, 23 bp, Papilloma virus
achwmaaaccawccwhwacahcc

SEQ ID NO: 346 - DNA, 23 bp, Papilloma virus
achwhaaaccahccwhwacahcc

SEQ ID NO: 347 - DNA, 23 bp, Papilloma virus
grkttdkwdtgtwrkgartaatt

SEQ ID NO: 348 - DNA, 17 bp, Papilloma virus
  misc_feature (1)..(17): n
rrhrrkttwgankwdga

SEQ ID NO: 349 - DNA, 22 bp, Papilloma virus
  misc_feature (1)..(22): n
ydatacctwhwhhdwhndccat

SEQ ID NO: 350 - DNA, 23 bp, Papilloma virus
achhhaaaccahcchhwacahcc

SEQ ID NO: 351 - DNA, 29 bp, Papilloma virus
gatggkgatatgrtdsatrtwggdtwtgg

SEQ ID NO: 352 - DNA, 25 bp, Papilloma virus
taartatttwgattatwtddraatg

SEQ ID NO: 353 - DNA, 28 bp, Papilloma virus
tattwtawccytahrchywhtahaacca

SEQ ID NO: 354 - DNA, 29 bp, Papilloma virus
amaaahamhtaatthyhmmaacawayacc

SEQ ID NO: 355 - DNA, 29 bp, Papilloma virus
taaaahayaaaytayamwtcawaytcytc

SEQ ID NO: 356 - DNA, 20 bp, Papilloma virus
trtatggarwdatattrgaa

SEQ ID NO: 357 - DNA, 19 bp, Papilloma virus
tratttrttaatwaggtgt

SEQ ID NO: 358 - DNA, 20 bp, Papilloma virus
aayayawhwtcwtacaayat

SEQ ID NO: 359 - DNA, 24 bp, Papilloma virus
aattactcatwacahwahaaatca

SEQ ID NO: 360 - DNA, 27 bp, Papilloma virus
gagggdawgggdtgtwrtggwtggttt

SEQ ID NO: 361 - DNA, 20 bp, Papilloma virus
gatrwwatattagatgatga

SEQ ID NO: 362 - DNA, 23 bp, Papilloma virus
twwactatytctwhhtctaccta

SEQ ID NO: 363 - DNA, 19 bp, Papilloma virus
cyahawtctttcattttaa

SEQ ID NO: 364 - DNA, 23 bp, Papilloma virus
tatddwtatatdtaragkktdat

SEQ ID NO: 365 - DNA, 22 bp, Papilloma virus
gggwrtggtdwtrttddtrtta

SEQ ID NO: 366 - DNA, 18 bp, Papilloma virus
haywatwmwwcwaytytt

SEQ ID NO: 367 - DNA, 20 bp, Papilloma virus
tawwhhhywaayayatttaa

SEQ ID NO: 368 - DNA, 20 bp, Papilloma virus
rggwgkrattgaawddggtk

SEQ ID NO: 369 - DNA, 19 bp, Papilloma virus
attraaadtggwdddtata

SEQ ID NO: 370 - DNA, 18 bp, Papilloma virus
hhhyytacahmmhayaca

SEQ ID NO: 371 - DNA, 19 bp, Papilloma virus
awwmwwmhwhwwahaymtc

SEQ ID NO: 372 - DNA, 20 bp, Papilloma virus
gggwgtrattgaaaddggtk

SEQ ID NO: 373 - DNA, 19 bp, Papilloma virus
attraaawtggtdddtata

SEQ ID NO: 374 - DNA, 18 bp, Papilloma virus
hhhyytacahtmhacaca

SEQ ID NO: 375 - DNA, 19 bp, Papilloma virus
awamwamhthwwatacmtc

SEQ ID NO: 376 - DNA, 20 bp, Papilloma virus
ttddwdtgtwrkgartaatt

SEQ ID NO: 377 - DNA, 20 bp, Papilloma virus
atggwddwwddwdwaggtat

SEQ ID NO: 378 - DNA, 20 bp, Papilloma virus
yhahwwactttcattttamh

SEQ ID NO: 379 - DNA, 20 bp, Papilloma virus
mwaywaccatwhmyactawm

SEQ ID NO: 380 - DNA, 20 bp, Papilloma virus
atggwkdwwtkwgwaggtat

SEQ ID NO: 381 - DNA, 19 bp, Papilloma virus
gggdtgtwddggdtggttt

SEQ ID NO: 382 - DNA, 20 bp, Papilloma virus
actayytchhhhtcyaccta

SEQ ID NO: 383 - DNA, 20 bp, Papilloma virus
yhahawactttcattttamh

SEQ ID NO: 384 - DNA, 20 bp, Papilloma virus
mwaywaccatahccactatc

SEQ ID NO: 385 - DNA, 18 bp, Papilloma virus
wmwhmhwwmatwhccatc

SEQ ID NO: 386 - DNA, 23 bp, Papilloma virus
ayhwmymhhwwwhhyywataytt

SEQ ID NO: 387 - DNA, 21 bp, Papilloma virus
rtttaargaddkdtwtggddt

SEQ ID NO: 388 - DNA, 20 bp, Papilloma virus
rragtratardwkwdkdtgt

SEQ ID NO: 389 - DNA, 20 bp, Papilloma virus
trtddwtatwtdtarwgktt

SEQ ID NO: 390 - DNA, 20 bp, Papilloma virus
aamcwytahawatawhhaya

SEQ ID NO: 391 - DNA, 17 bp, Papilloma virus
ttwttwwrrwtrtwdak

SEQ ID NO: 392 - DNA, 17 bp, Papilloma virus
mthwayawyywwaawaa

SEQ ID NO: 393 - DNA, 24 bp, Papilloma virus
atgrtdtartgggtwtwtgatwat

SEQ ID NO: 394 - DNA, 24 bp, Papilloma virus
atwatcawawacccaytahaycat

SEQ ID NO: 395 - DNA, 19 bp, Papilloma virus
gadgadwrtdwdatdgtdt

SEQ ID NO: 396 - DNA, 19 bp, Papilloma virus
ahachathwhaywhtchtc

SEQ ID NO: 397 - DNA, 22 bp, Papilloma virus
gattgtgkddkwatgkkwwrrt

SEQ ID NO: 398 - DNA, 21 bp, Papilloma virus
ayywmmcatwmhhmcacaatc

SEQ ID NO: 399 - DNA, 19 bp, Papilloma virus
drtdttwaarwadarttgt

SEQ ID NO: 400 - DNA, 19 bp, Papilloma virus
acaaythtwyttwaahayh

SEQ ID NO: 401 - DNA, 23 bp, Papilloma virus
aatktwdddagttatttttggtt

SEQ ID NO: 402 - DNA, 23 bp, Papilloma virus
aaccaaaaataacthhhwamatt

SEQ ID NO: 403 - DNA, 23 bp, Papilloma virus
ttdgtwgawdkwratagtaatgt

SEQ ID NO: 404 - DNA, 23 bp, Papilloma virus
acattactaytwmhwtcwachaa

SEQ ID NO: 405 - DNA, 22 bp, Papilloma virus
gattgtgkdrtwatgkkwwrrt

SEQ ID NO: 406 - DNA, 22 bp, Papilloma virus
ayywwmmcatwayhmcacaatc

SEQ ID NO: 407 - DNA, 19 bp, Papilloma virus
rrkgadgrdggdrattgga

SEQ ID NO: 408 - DNA, 19 bp, Papilloma virus
tccaatyhcchychtcmyy

SEQ ID NO: 409 - DNA, 21 bp, Papilloma virus
ggwrtdttwaarwawarttgt

SEQ ID NO: 410 - DNA, 21 bp, Papilloma virus
acaaytwtwyttwaahaywcc

SEQ ID NO: 411 - DNA, 23 bp, Papilloma virus
aatttwdddagttatttttggtt

SEQ ID NO: 412 - DNA, 23 bp, Papilloma virus
aaccaaaaataacthhhwaaatt

SEQ ID NO: 413 - DNA, 18 bp, Papilloma virus
gatggdwatkwwdkwwkw

SEQ ID NO: 414 - DNA, 18 bp, Papilloma virus
wmwwmhwwmatwhccatc

SEQ ID NO: 415 - DNA, 26 bp, Papilloma virus
aartatwrrddwtwrdkrtarwtrdw

SEQ ID NO: 416 - DNA, 26 bp, Papilloma virus
whyawytaymhywawhhyywataytt

SEQ ID NO: 417 - DNA, 24 bp, Papilloma virus
ataywywamatthcyattwwhatc

SEQ ID NO: 418 - DNA, 21 bp, Papilloma virus
aaayytaatytamaccahatm

SEQ ID NO: 419 - DNA, 21 bp, Papilloma virus
atttaaagaddtdtwtggddt

SEQ ID NO: 420 - DNA, 20 bp, Papilloma virus
aragtratarwwkwwkdtgt

SEQ ID NO: 421 - DNA, 21 bp, Papilloma virus
trtddwtatwtdtarwgttta

SEQ ID NO: 422 - DNA, 21 bp, Papilloma virus
taaacwytahawatawhhaya

SEQ ID NO: 423 - DNA, 19 bp, Papilloma virus
gtdkwaaradkagrdwaat

SEQ ID NO: 424 - DNA, 19 bp, Papilloma virus
attwhyctmhtyttwmhac

SEQ ID NO: 425 - DNA, 18 bp, Papilloma virus
ttwttwaaawtrtgdagt

SEQ ID NO: 426 - DNA, 18 bp, Papilloma virus
acthcayawtttwaawaa

SEQ ID NO: 427 - DNA, 26 bp, Papilloma virus
ttrtattkktwtwraatwgkwwtrtt

SEQ ID NO: 428 - DNA, 26 bp, Papilloma virus
aayawwmcwattywawammaatayaa

SEQ ID NO: 429 - DNA, 18 bp, Papilloma virus
tartatrgwwtwdakkat

SEQ ID NO: 430 - DNA, 18 bp, Papilloma virus
atmhtmwawwcyatayta

SEQ ID NO: 431 - DNA, 26 bp, Papilloma virus
atgrtrtartgggtwtwtgatwatga

SEQ ID NO: 432 - DNA, 26 bp, Papilloma virus
tcatwatcawawacccayatyaycat

SEQ ID NO: 433 - DNA, 21 bp, Papilloma virus
gatgawagtkawatdgtdtwt

SEQ ID NO: 434 - DNA, 21 bp, Papilloma virus
awahachatwtmactwtcatc

SEQ ID NO: 435 - DNA, 22 bp, Papilloma virus
twkwrkawaatttdktwtwtga

SEQ ID NO: 436 - DNA, 23 bp, Papilloma virus
ttdgatttdgattttwtrratat

SEQ ID NO: 437 - DNA, 21 bp, Papilloma virus
acthahatchtaataawaata

SEQ ID NO: 438 - DNA, 18 bp, Papilloma virus
hhhtyywawtyayawttc

SEQ ID NO: 439 - DNA, 18 bp, Papilloma virus
acatahayatcawahmww

SEQ ID NO: 440 - DNA, 22 bp, Papilloma virus
ttartgadrdtawdgtdtattt

SEQ ID NO: 441 - DNA, 20 bp, Papilloma virus
atwrrtatwtwttattatgt

SEQ ID NO: 442 - DNA, 23 bp, Papilloma virus
cyaaayttattwaaatchaayaa

SEQ ID NO: 443 - DNA, 27 bp, Papilloma virus
acchayytchahhcchayacawmccca

SEQ ID NO: 444 - DNA, 21 bp, Papilloma virus
wmhahtttcwatatcatchwa

SEQ ID NO: 445 - DNA, 21 bp, Papilloma virus
ggdtwtggdkkwatggatttt

SEQ ID NO: 446 - DNA, 21 bp, Papilloma virus
wktrtwtgtaartatttwgat

SEQ ID NO: 447 - DNA, 20 bp, Papilloma virus
gtwagrtattwwtdkaatwr

SEQ ID NO: 448 - DNA, 20 bp, Papilloma virus
ywattmhawwaatayctwac

SEQ ID NO: 449 - DNA, 19 bp, Papilloma virus
tdttwagtggdttwatdgt

SEQ ID NO: 450 - DNA, 19 bp, Papilloma virus
achatwaahccactwaaha

SEQ ID NO: 451 - DNA, 24 bp, Papilloma virus
tarwtdtttaataarttdtattgg

SEQ ID NO: 452 - DNA, 24 bp, Papilloma virus
ccaatahaayttattaaahawyta

SEQ ID NO: 453 - DNA, 24 bp, Papilloma virus
ggwtataataatggtrtwtgttgg

SEQ ID NO: 454 - DNA, 24 bp, Papilloma virus
ccaacawayaccattattatawcc

SEQ ID NO: 455 - DNA, 21 bp, Papilloma virus
gatatwatwwkdartatwaat

SEQ ID NO: 456 - DNA, 21 bp, Papilloma virus
attwataythmwwatwatatc

SEQ ID NO: 457 - DNA, 26 bp, Papilloma virus
taaaahayaaaytayaawtcawaytc

SEQ ID NO: 458 - DNA, 24 bp, Papilloma virus
atycathhhatawawatawahcat

SEQ ID NO: 459 - DNA, 26 bp, Papilloma virus
ttgwadtaaaaatttdtkdttwardg

SEQ ID NO: 460 - DNA, 24 bp, Papilloma virus
ttttkwarrttwatwkkttaaaaw

SEQ ID NO: 461 - DNA, 20 bp, Papilloma virus
kkttkttgrtadktwrtdgt

SEQ ID NO: 462 - DNA, 28 bp, Papilloma virus
atwktrtawarttgaaawataaattgta

SEQ ID NO: 463 - DNA, 30 bp, Papilloma virus
ttgaaawataaattgtardttawatttttt

SEQ ID NO: 464 - DNA, 26 bp, Papilloma virus
ttgrttrtkttartawatrttattrt

SEQ ID NO: 465 - DNA, 26 bp, Papilloma virus
ttartawggtttattraawawttgdg

SEQ ID NO: 466 - DNA, 27 bp, Papilloma virus
tatttkwadatarttwggatatttrta

SEQ ID NO: 467 - DNA, 24 bp, Papilloma virus
trtkwattatrttdttrttttkwa

SEQ ID NO: 468 - DNA, 24 bp, Papilloma virus
rtatarttgdgtttgtttdkdrtt

SEQ ID NO: 469 - DNA, 23 bp, Papilloma virus
attttwaddttwrtatadkttta

SEQ ID NO: 470 - DNA, 26 bp, Papilloma virus
atttkdttttgdwwkdwatttaaatg

SEQ ID NO: 471 - DNA, 26 bp, Papilloma virus
kwwarwggttktarttaaaartgrtt

SEQ ID NO: 472 - DNA, 26 bp, Papilloma virus
tttatwkwaaadwrtgatttdtttgt

SEQ ID NO: 473 - DNA, 25 bp, Papilloma virus
ttkttkdgtttktttrtartgttkd

SEQ ID NO: 474 - DNA, 25 bp, Papilloma virus
tatartttttwaddwwtttdgtttg

SEQ ID NO: 475 - DNA, 20 bp, Papilloma virus
achaywamhtaycaamaamm

SEQ ID NO: 476 - DNA, 28 bp, Papilloma virus
tacaatttatwtttcaaytwtayamwat

SEQ ID NO: 477 - DNA, 30 bp, Papilloma virus
aaaaaatwtaahytacaatttatwtttcaa

SEQ ID NO: 478 - DNA, 26 bp, Papilloma virus
ayaataayatwtaytaamayaaycaa

SEQ ID NO: 479 - DNA, 26 bp, Papilloma virus
chcaawtwttyaataaaccwtaytaa

SEQ ID NO: 480 - DNA, 27 bp, Papilloma virus
tayaaatatccwaaytathtwmaaata

SEQ ID NO: 481 - DNA, 24 bp, Papilloma virus
twmaaaayaahaayataatwmaya

SEQ ID NO: 482 - DNA, 24 bp, Papilloma virus
aayhmhaaacaaachcaaytatay

SEQ ID NO: 483 - DNA, 23 bp, Papilloma virus
taaamhtataywaahhtwaaaat

SEQ ID NO: 484 - DNA, 26 bp, Papilloma virus
athmmhttacchaaycchaayaaatt

SEQ ID NO: 485 - DNA, 26 bp, Papilloma virus
tattttyttwcaaatawchhywtaac

SEQ ID NO: 486 - DNA, 23 bp, Papilloma virus
acwtaatmcaaattaaayttamw

SEQ ID NO: 487 - DNA, 22 bp, Papilloma virus
ahthaayaayawaaaytaaaaa

SEQ ID NO: 488 - DNA, 26 bp, Papilloma virus
acaaahaaatcaywhtttwmwataaa

SEQ ID NO: 489 - DNA, 25 bp, Papilloma virus
hmaacaytayaaamaaachmaamaa

SEQ ID NO: 490 - DNA, 25 bp, Papilloma virus
caaachaaawwhhtwaaaaaytata

SEQ ID NO: 491 - DNA, 28 bp, Papilloma virus
amataatacaataaacmtwyaaymayaa

SEQ ID NO: 492 - DNA, 22 bp, Papilloma virus
aawamhacmcchaaataaatwm

SEQ ID NO: 493 - DNA, 26 bp, Papilloma virus
gattatataaattgtttgatttgagt

SEQ ID NO: 494 - DNA, 21 bp, Papilloma virus
caatattgaatatttttttgt

SEQ ID NO: 495 - DNA, 28 bp, Papilloma virus
cttacataaaataaaatacatttcaaac

SEQ ID NO: 496 - DNA, 27 bp, Papilloma virus
ctcatataacratatcttaatttcaac

SEQ ID NO: 497 - DNA, 28 bp, Papilloma virus
aaattatgaggaagttgattttgtgtgt

SEQ ID NO: 498 - DNA, 25 bp, Papilloma virus
gagttaattattttttgttattagt

SEQ ID NO: 499 - DNA, 27 bp, Papilloma virus
tatatccataaacaactactataaaac

SEQ ID NO: 500 - DNA, 27 bp, Papilloma virus
atctataccttccraatcraccattac

SEQ ID NO: 501 - DNA, 27 bp, Papilloma virus
gttattgattgttatgattttatgtgt

SEQ ID NO: 502 - DNA, 25 bp, Papilloma virus
gtatttattgttggattttttgagt

SEQ ID NO: 503 - DNA, 26 bp, Papilloma virus
ctaaattatcacaataatccactaac

SEQ ID NO: 504 - DNA, 23 bp, Papilloma virus
taatattactacaaaaaatatac

SEQ ID NO: 505 - DNA, 24 bp, Papilloma virus
gtttgtgtgtgtgttgtaatgttt

SEQ ID NO: 506 - DNA, 27 bp, Papilloma virus
gtttttgtaatttgtttatatgtgtgt

SEQ ID NO: 507 - DNA, 27 bp, Papilloma virus
ttattatataaacaatattacataaac

SEQ ID NO: 508 - DNA, 24 bp, Papilloma virus
aaaatatactatacaatacaatac

SEQ ID NO: 509 - DNA, 27 bp, Papilloma virus
ttattgtagaaggtaattataayggat

SEQ ID NO: 510 - DNA, 26 bp, Papilloma virus
gggayggggtattattagttgtatgt

SEQ ID NO: 511 - DNA, 25 bp, Papilloma virus
ctcaataatttcaaacaacacatac

SEQ ID NO: 512 - DNA, 25 bp, Papilloma virus
aaatcttcrttttaaatttaaatac

SEQ ID NO: 513 - DNA, 25 bp, Papilloma virus
aatagygttatataatttagtgtat

SEQ ID NO: 514 - DNA, 25 bp, Papilloma virus
gtagtagaagygtygygggagaatt

SEQ ID NO: 515 - DNA, 27 bp, Papilloma virus
atccccatctataccttcacaattaac

SEQ ID NO: 516 - DNA, 24 bp, Papilloma virus
ttatttatctactattacttatac

SEQ ID NO: 517 - DNA, 8 bp, Papilloma virus
tcataata

SEQ ID NO: 518 - DNA, 8 bp, Papilloma virus
ttataata

SEQ ID NO: 519 - DNA, 8 bp, Papilloma virus
ccataata

SEQ ID NO: 520 - DNA, 8 bp, Papilloma virus
ttataata

SEQ ID NO: 521 - DNA, 8 bp, Papilloma virus
ccacaaca

SEQ ID NO: 522 - DNA, 8 bp, Papilloma virus
ttataata

SEQ ID NO: 523 - DNA, 8 bp, Papilloma virus
ccacaata

SEQ ID NO: 524 - DNA, 8 bp, Papilloma virus
ttataata

SEQ ID NO: 525 - DNA, 8 bp, Papilloma virus
tcataaca

SEQ ID NO: 526 - DNA, 8 bp, Papilloma virus
ttataata

SEQ ID NO: 527 - DNA, 8 bp, Papilloma virus
ccacaata

SEQ ID NO: 528 - DNA, 8 bp, Papilloma virus
ttataata

SEQ ID NO: 529 - DNA, 8 bp, Papilloma virus
tcataaca

SEQ ID NO: 530 - DNA, 8 bp, Papilloma virus
ttataata

SEQ ID NO: 531 - DNA, 8 bp, Papilloma virus
ccataaca

SEQ ID NO: 532 - DNA, 8 bp, Papilloma virus
ttataata

SEQ ID NO: 533 - DNA, 8 bp, Papilloma virus
ccataata

SEQ ID NO: 534 - DNA, 8 bp, Papilloma virus
ttataata

SEQ ID NO: 535 - DNA, 17 bp, Papilloma virus
agcccagggacataaca

SEQ ID NO: 536 - DNA, 17 bp, Papilloma virus
agtttagggatataata

SEQ ID NO: 537 - DNA, 17 bp, Papilloma virus
ggctcagggacataaca

SEQ ID NO: 538 - DNA, 17 bp, Papilloma virus
ggtttagggatataata

SEQ ID NO: 539 - DNA, 17 bp, Papilloma virus
ggcccagggacataata

SEQ ID NO: 540 - DNA, 17 bp, Papilloma virus
ggtttagggatataata

SEQ ID NO: 541 - DNA, 17 bp, Papilloma virus
ggcgcagggccacaata

SEQ ID NO: 542 - DNA, 17 bp, Papilloma virus
ggtgtagggttataata

SEQ ID NO: 543 - DNA, 17 bp, Papilloma virus
tgcccagggacataata

SEQ ID NO: 544 - DNA, 17 bp, Papilloma virus
tgtttagggatataata

SEQ ID NO: 545 - DNA, 17 bp, Papilloma virus
ggcgcagggccacaata

SEQ ID NO: 546 - DNA, 17 bp, Papilloma virus
ggtgtagggttataata

SEQ ID NO: 547 - DNA, 17 bp, Papilloma virus
cgcacagggacacaata

SEQ ID NO: 548 - DNA, 17 bp, Papilloma virus
tgtatagggatataata

SEQ ID NO: 549 - DNA, 17 bp, Papilloma virus
tgctcagggacacaata

SEQ ID NO: 550 - DNA, 17 bp, Papilloma virus
tgtttagggatataata

SEQ ID NO: 551 - DNA, 17 bp, Papilloma virus
ggcccagggccacaaca

SEQ ID NO: 552 - DNA, 17 bp, Papilloma virus
ggtttagggttataata

SEQ ID NO: 553 - DNA, 17 bp, Papilloma virus
tgcgcagggtcacaata

SEQ ID NO: 554 - DNA, 17 bp, Papilloma virus
tgtgtagggttataata

SEQ ID NO: 555 - DNA, 17 bp, Papilloma virus
tgcgcagggccacaata

SEQ ID NO: 556 - DNA, 17 bp, Papilloma virus
tgtgtagggttataata

SEQ ID NO: 557 - DNA, 17 bp, Papilloma virus
agcacagggccacaata

SEQ ID NO: 558 - DNA, 17 bp, Papilloma virus
agtatagggttataata

SEQ ID NO: 559 - DNA, 17 bp, Papilloma virus
ggcacagggtcataaca

SEQ ID NO: 560 - DNA, 17 bp, Papilloma virus
ggtatagggttataata

SEQ ID NO: 561 - DNA, 17 bp, Papilloma virus
ggcccagggccataaca

SEQ ID NO: 562 - DNA, 17 bp, Papilloma virus
ggtttagggttataata

SEQ ID NO: 563 - DNA, 17 bp, Papilloma virus
  misc_feature (1)..(17): n
ngcncaggghcahaaya

SEQ ID NO: 564 - DNA, 17 bp, Papilloma virus
dgtdtagggytataata

SEQ ID NO: 565 - DNA, 20 bp, Papilloma virus
gatggcgatatggttgacac

SEQ ID NO: 566 - DNA, 20 bp, Papilloma virus
gatggtgatatggttgatat

SEQ ID NO: 567 - DNA, 20 bp, Papilloma virus
gatggtgacatggtagatac

SEQ ID NO: 568 - DNA, 20 bp, Papilloma virus
gatggtgatatggtagatat

SEQ ID NO: 569 - DNA, 20 bp, Papilloma virus
gatggtgatatggtggacac

SEQ ID NO: 570 - DNA, 20 bp, Papilloma virus
gatggtgatatggtggatat

SEQ ID NO: 571 - DNA, 20 bp, Papilloma virus
gatggtgatatggtagatat

SEQ ID NO: 572 - DNA, 20 bp, Papilloma virus
gatggtgatatggtagatat

SEQ ID NO: 573 - DNA, 20 bp, Papilloma virus
gatggtgatatggtggacac

SEQ ID NO: 574 - DNA, 20 bp, Papilloma virus
gatggtgatatggtggatat

SEQ ID NO: 575 - DNA, 20 bp, Papilloma virus
gatggcgacatggttgatat

SEQ ID NO: 576 - DNA, 20 bp, Papilloma virus
gatggtgatatggttgatat

SEQ ID NO: 577 - DNA, 20 bp, Papilloma virus
gatggtgatatggtggacac

SEQ ID NO: 578 - DNA, 20 bp, Papilloma virus
gatggtgatatggtggatat

SEQ ID NO: 579 - DNA, 20 bp, Papilloma virus
gatggtgacatggtagatac

SEQ ID NO: 580 - DNA, 20 bp, Papilloma virus
gatggtgatatggtagatat

SEQ ID NO: 581 - DNA, 20 bp, Papilloma virus
gatggtgatatggtagatac

SEQ ID NO: 582 - DNA, 20 bp, Papilloma virus
gatggtgatatggtagatat

SEQ ID NO: 583 - DNA, 20 bp, Papilloma virus
gatggtgatatggtggatac

SEQ ID NO: 584 - DNA, 20 bp, Papilloma virus
gatggtgatatggtggatat

SEQ ID NO: 585 - DNA, 20 bp, Papilloma virus
gatggygayatggtdgayay

SEQ ID NO: 586 - DNA, 20 bp, Papilloma virus
gatggtgatatggtdgatat

SEQ ID NO: 587 - DNA, 20 bp, Papilloma virus
gatggcgatatggttgacac

SEQ ID NO: 588 - DNA, 20 bp, Papilloma virus
gatggtgatatggttgatat

SEQ ID NO: 589 - DNA, 20 bp, Papilloma virus
gatggtgacatggtagatac

SEQ ID NO: 590 - DNA, 20 bp, Papilloma virus
gatggtgatatggtagatat

SEQ ID NO: 591 - DNA, 20 bp, Papilloma virus
gatggtgatatggtggacac

SEQ ID NO: 592 - DNA, 20 bp, Papilloma virus
gatggtgatatggtggatat

SEQ ID NO: 593 - DNA, 20 bp, Papilloma virus
gatggtgatatggtagatat

SEQ ID NO: 594 - DNA, 20 bp, Papilloma virus
gatggtgatatggtagatat

SEQ ID NO: 595 - DNA, 20 bp, Papilloma virus
gatggtgatatggtggacac

SEQ ID NO: 596 - DNA, 20 bp, Papilloma virus
gatggtgatatggtggatat

SEQ ID NO: 597 - DNA, 20 bp, Papilloma virus
gatggcgacatggttgatat

SEQ ID NO: 598 - DNA, 20 bp, Papilloma virus
gatggtgatatggttgatat

SEQ ID NO: 599 - DNA, 20 bp, Papilloma virus
gatggtgatatggtggacac

SEQ ID NO: 600 - DNA, 20 bp, Papilloma virus
gatggtgatatggtggatat

SEQ ID NO: 601 - DNA, 20 bp, Papilloma virus
gatggtgacatggtagatac

SEQ ID NO: 602 - DNA, 20 bp, Papilloma virus
gatggtgatatggtagatat

SEQ ID NO: 603 - DNA, 20 bp, Papilloma virus
gatggtgatatggtagatac

SEQ ID NO: 604 - DNA, 20 bp, Papilloma virus
gatggtgatatggtagatat

SEQ ID NO: 605 - DNA, 20 bp, Papilloma virus
gatggtgatatggtggatac

SEQ ID NO: 606 - DNA, 20 bp, Papilloma virus
gatggtgatatggtggatat

SEQ ID NO: 607 - DNA, 14 bp, Papilloma virus
gatggygayatggt

SEQ ID NO: 608 - DNA, 14 bp, Papilloma virus
gatggtgatatggt

SEQ ID NO: 609 - DNA, 23 bp, Papilloma virus
gatttdkwdtgtwatgagtaatt

SEQ ID NO: 610 - DNA, 23 bp, Papilloma virus
achhhaaaccahcchhwacahcc

SEQ ID NO: 611 - DNA, 23 bp, Papilloma virus
grkttdkwdtgtwrkgartaatt

SEQ ID NO: 612 - DNA, 23 bp, Papilloma virus
achhhaaaccahcchhwacahcc

SEQ ID NO: 613 - DNA, 7904 bp, Papilloma virus
actacaataattcatgtataaaactaagggcgtaaccgaaatcggttgaaccgaaaccggttagtataaaagcagacattttatgcaccaaaagagaactgcaatgtttcaggacccacaggagcgacccagaaagttaccacagttatgcacagagctgcaaacaactatacatgatataatattagaatgtgtgtactgcaagcaacagttactgcgacgtgaggtatatgactttgcttttcgggatttatgcatagtatatagagatgggaatccatatgctgtatgtgataaatgtttaaagttttattctaaaattagtgagtatagacattattgttatagtttgtatggaacaacattagaacagcaatacaacaaaccgttgtgtgatttgttaattaggtgtattaactgtcaaaagccactgtgtcctgaagaaaagcaaagacatctggacaaaaagcaaagattccataatataaggggtcggtggaccggtcgatgtatgtcttgttgcagatcatcaagaacacgtagagaaacccagctgtaatcatgcatggagatacacctacattgcatgaatatatgttagatttgcaaccagagacaactgatctctactgttatgagcaattaaatgacagctcagaggaggaggatgaaatagatggtccagctggacaagcagaaccggacagagcccattacaatattgtaaccttttgttgcaagtgtgactctacgcttcggttgtgcgtacaaagcacacacgtagacattcgtactttggaagacctgttaatgggcacactaggaattgtgtgccccatctgttctcagaaaccataatctaccatggctgatcctgcaggtaccaatggggaagagggtacgggatgtaatggatggttttatgtagaggctgtagtggaaaaaaaaacaggggatgctatatcagatgacgagaacgaaaatgacagtgatacaggtgaagatttggtagattttatagtaaatgataatgattatttaacacaggcagaaacagagacagcacatgcgttgtttactgcacaggaagcaaaacaacatagagatgcagtacaggttctaaaacgaaagtatttggtagtccacttagtgatattagtggatgtgtagacaataatattagtcctagattaaaagctatatgtatagaaaaacaaagtagagctgcaaaaaggagattatttgaaagcgaagacagcgggtatggcaatactgaagtggaaactcagcagatgttacaggtagaagggcgccatgagactgaaacaccatgtagtcagtatagtggtggaagtgggggtggttgcagtcagtacagtagtggaagtgggggagagggtgttagtgaaagacacactatatgccaaacaccacttacaaatattttaaatgtactaaaaactagtaatgcaaaggcagcaatgttagcaaaatttaaagagttatacggggtgagtttttcagaattagtaagaccatttaaaagtaataaatcaacgtgttgcgattggtgtattgctgcatttggacttacacccagtatagctgacagtataaaaacactattacaacaatattgtttatatttacacattcaaagtttagcatgttcatggggaatggttgtgttactattagtaagatataaatgtggaaaaaatagagaaacaattgaaaaattgctgtctaaactattatgtgtgtctccaatgtgtatgatgatagagcctccaaaattgcgtagtacagcagcagcattatattggtataaaacaggtatatcaaatattagtgaagtgtatggagacacgccagaatggatacaaagacaaacagtattacaacatagttttaatgattgtacatttgaattatcacagatggtacaatgggcctacgataatgacatagtagacgatagtgaaattgcatataaatatgcacaattggcagacactaatagtaatgcaagtgcctttctaaaaagtaattcacaggcaaaaattgtaaaggattgtgcaacaatgtgtagacattataaacgagcagaaaaaaaacaaatgagtatgagtcaatggataaaatatagatgtgatagggtagatgatggaggtgattggaagcaaattgttatgtttttaaggtatcaaggtgtagagtttatgtcatttttaactgcattaaaaagatttttgcaaggcatacctaaaaaaaattgcatattactatatggtgcagctaacacaggtaaatcattatttggtatgagtttaatgaaatttctgcaagggtctgtaatatgttttgtaaattctaaaagccatttttggttacaaccattagcagatgccaaaataggtatgttagatgatgctacagtgccctgttggaactacatagatgacaatttaagaaatgcattggatggaaatttagtttctatggatgtaaagcatagaccattggtacaactaaaatgccctccattattaattacatctaacattaatgctggtacagattctaggtggccttatttacataatagattggtggtgtttacatttcctaatgagtttccatttgacgaaaacggaaatccagtgtatgagcttaatgataagaactggaaatcctttttctcaaggacgtggtccagattaagtttgcacgaggacgaggacaaggaaaacgatggagactctttgccaacgtttaaatgtgtgtcaggacaaaatactaacacattatgaaaatgatagtacagacctacgtgaccatatagactattggaaacacatgcgcctagaatgtgctatttattacaaggccagagaaatgggatttaaacatattaaccaccaagtggtgccaacactggctgtatcaaagaataaagcattacaagcaattgaactgcaactaacgttagaaacaatatataactcacaatatagtaatgaaaagtggacattacaagacgttagccttgaagtgtatttaactgcaccaacaggatgtataaaaaaacatggatatacagtggaagtgcagtttgatggagacatatgcaatacaatgcattatacaaactggacacatatatatatttgtgaagaagcatcagtaactgtggtagagggtcaagttgactattatggtttatattatgttcatgaaggaatacgaacatattttgtgcagtttaaagatgatgcagaaaaatatagtaaaaataaagtatgggaagttcatgcgggtggtcaggtaatattatgtcctacatctgtgtttagcagcaacgaagtatcctctcctgaaattattaggcagcacttggccaaccaccccgccgcgacccataccaaagccgtcgccttgggcaccgaagaaacacagacgactatccagcgaccaagatcagagccagacaccggaaacccctgccacaccactaagttgttgcacagagactcagtggacagtgctccaatcctcactgcatttaacagctcacacaaaggacggattaactgtaatagtaacactacacccatagtacatttaaaaggtgatgctaatactttaaaatgtttaagatatagatttaaaaagcattgtacattgtatactgcagtgtcgtctacatggcattggacaggacataatgtaaaacataaaagtgcaattgttacacttacatatgatagtgaatggcaacgtgaccaatttttgtctcaagttaaaataccaaaaactattacagtgtctactggatttatgtctatatgacaaatcttgatactgcatccacaacattactggcgtgctttttgctttgctttgtgtgcttttgtgtgtctgcctattaatacgtccgctgcttttgtctgtgtctacatacacatcattaataatattggtattactattgtggataacagcagcctctgcgtttaggtgttttattgtatatattatatttgtttatataccattatttttaatacatacacatgcacgctttttaattacataatgtatatgtacataatgtaattgttacatataattgttgtataccataacttactattttttcttttttattttcatatataatttttttttttgtttgtttgtttgttttttaataaactgttattacttaacaatgcgacacaaacgttctgcaaaacgcacaaaacgtgcatcggctacccaactttataaaacatgcaaacaggcaggtacatgtccacctgacattatacctaaggttgaaggcaaaactattgctgaacaaatattacaatatggaagtatgggtgtattttttggtgggttaggaattggaacagggtcgggtacaggcggacgcactgggtatattccattgggaacaaggcctcccacagctacagatacacttgctcctgtaagaccccctttaacagtagatcctgtgggcccttctgatccttctatagtttctttagtggaagaaactagttttattgatgctggtgcaccaacatctgtaccttccattcccccagatgtatcaggatttagtattactacttcaactgataccacacctgctatattagatattaataatactgttactactgttactacacataataatcccactttcactgacccatctgtattgcagcctccaacacctgcagaaactggagggcattttacactttcatcatccactattagtacacataattatgaagaaattcctatggatacatttattgttagcacaaaccctaacacagtaactagtagcacacccataccagggtctcgcccagtggcacgcctaggattatatagtcgcacaacacaacaggttaaagttgtagaccctgcttttgtaaccactcccactaaacttattacatatgataatcctgcatatgaaggtatagatgtggataatacattatatttttctagtaatgataatagtattaatatagctccagatcctgactttttggatatagttgctttacataggccagcattaacctctaggcgtactggcattaggtacagtagaattggtaataaacaaacactacgtactcgtagtggaaaatctataggtgctaaggtacattattattatgatttaagtactattgatcctgcagaagaaatagaattacaaactataacaccttctacatatactaccacttcacatgcagcctcacctacttctattaataatggattatatgatatttatgcagatgactttattacagatacttctacaaccccggtaccatctgtaccctctacatctttatcaggttatattcctgcaaatacaacaattccttttggtggtgcatacaatattcctttagtatcaggtcctgatatacccattaatataactgaccaagctccttcattaattcctatagttccagggtctccacaatatacaattattgctgatgcaggtgacttttatttacatcctagttattacatgttacgaaaacgacgtaaacgtttaccatattttttttcagatgtctctttggctgcctagtgaggccactgtctacttgcctcctgtcccagtatctaaggttgtaagcacggatgaatatgttgcacgcacaaacatatattatcatgcaggaacatccagactacttgcagttggacatccctattttcctattaaaaaacctaacaataacaaaatattagttcctaaagtatcaggattacaatacagggtatttagaatacatttacctgaccccaataagtttggttttcctgacacctcattttataatccagatacacagcggctggtttgggcctgtgtaggtgttgaggtaggtcgtggtcagccattaggtgtgggcattagtggccatcctttattaaataaattggatgacacagaaaatgctagtgcttatgcagcaaatgcaggtgtggataatagagaatgtatatctatggattacaaacaaacacaattgtgtttaattggttgcaaaccacctataggggaacactggggcaaaggatccccatgtaccaatgttgcagtaaatccaggtgattgtccaccattagagttaataaacacagttattcaggatggtgatatggttcatactggctttggtgctatggactttactacattacaggctaacaaaagtgaagttccactggatatttgtacatctatttgcaaatatccagattatattaaaatggtgtcagaaccatatggcgacagcttatttttttatttacgaagggaacaaatgtttgttagacatttatttaatagggctggtactgttggtgaaaatgtaccagacgatttatacattaaaggctctgggtctactgcaaatttagccagttcaaattattttcctacacctagtggttctatggttacctctgatgcccaaatattcaataaaccttattggttacaacgagcacagggccacaataatggcatttgttggggtaaccaactatttgttactgttgttgatactacacgcagtacaaatatgtcattatgtgctgccatatctacttcagaaactacatataaaaatactaactttaaggagtacctacgacatggggaggaatatgatttacagtttatttttcaactgtgcaaaataaccttaactgcagacgttatgacatacatacattctatgaattccactattttggaggactggaattttggtctacaacctcccccaggaggcacactagaagatacttataggtttgtaacccaggcaattgcttgtcaaaaacatacacctccagcacctaaagaagatgatccccttaaaaaatacactttttgggaagtaaatttaaaggaaaagttttctgcagacctagatcagtttcctttaggacgcaaatttttactacaagcaggattgaaggccaaaccaaaatttacattaggaaaacgaaaagctacacccaccacctcatctacctctacaactgctaaacgcaaaaaacgtaagctgtaagtattgtatgtatgttgaattagtgttgtttgttgtgtatatgtttgtatgtgcttgtatgtgcttgtaaatattaagttgtatgtgtgtttgtatgtatggtataataaacacgtgtgtatgtgtttttaaatgcttgtgtaactattgtgtcatgcaacataaataaacttattgtttcaacacctactaattgtgttgtggttattcattgtatataaactatatttgctacatcctgtttttgttttatatatactatattttgtagcgccaggcccattttgtagcttcaaccgaattcggttgcatgctttttggcacaaaatgtgtttttttaaatagttctatgtcagcaactatggtttaaacttgtacgtttcctgcttgccatgcgtgccaaatccctgttttcctgacctgcactgcttgccaaccattccattgttttttacactgcactatgtgcaactactgaatcactatgtacattgtgtcatataaaataaatcactatgcgccaacgccttacataccgctgttaggcacatatttttggcttgttttaactaacctaattgcatatttggcataaggtttaaacttctaaggccaactaaatgtcaccctagttcatacatgaactgtgtaaaggttagtcatacattgttcatttgtaaaactgcacatgggtgtgtgcaaaccgattttgggttacacatttacaagcaacttatataataatactaa

SEQ ID NO: 614 - DNA, 7904 bp, Papilloma virus
autauaataattuatgtataaaautaagggugtaauugaaatuggttgaauugaaauuggttagtataaaaguagauattttatguauuaaaagagaautguaatgtttuaggauuuauaggagugauuuagaaagttauuauagttatguauagagutguaaauaautatauatgatataatattagaatgtgtgtautguaaguaauagttautgugaugtgaggtatatgautttguttttugggatttatguatagtatatagagatgggaatuuatatgutgtatgtgataaatgtttaaagttttattutaaaattagtgagtatagauattattgttatagtttgtatggaauaauattagaauaguaatauaauaaauugttgtgtgatttgttaattaggtgtattaautgtuaaaaguuautgtgtuutgaagaaaaguaaagauatutggauaaaaaguaaagattuuataatataaggggtuggtggauuggtugatgtatgtuttgttguagatuatuaagaauaugtagagaaauuuagutgtaatuatguatggagatauauutauattguatgaatatatgttagatttguaauuagagauaautgatututautgttatgaguaattaaatgauagutuagaggaggaggatgaaatagatggtuuagutggauaaguagaauuggauagaguuuattauaatattgtaauuttttgttguaagtgtgaututauguttuggttgtgugtauaaaguauauaugtagauattugtautttggaagauutgttaatggguauautaggaattgtgtguuuuatutgttutuagaaauuataatutauuatggutgatuutguaggtauuaatggggaagagggtaugggatgtaatggatggttttatgtagaggutgtagtggaaaaaaaaauaggggatgutatatuagatgaugagaaugaaaatgauagtgatauaggtgaagatttggtagattttatagtaaatgataatgattatttaauauagguagaaauagagauaguauatgugttgtttautguauaggaaguaaaauaauatagagatguagtauaggttutaaaaugaaagtatttggtagtuuauttagtgatattagtggatgtgtagauaataatattagtuutagattaaaagutatatgtatagaaaaauaaagtagagutguaaaaaggagattatttgaaagugaagauagugggtatgguaatautgaagtggaaautuaguagatgttauaggtagaaggguguuatgagautgaaauauuatgtagtuagtatagtggtggaagtgggggtggttguagtuagtauagtagtggaagtgggggagagggtgttagtgaaagauauautatatguuaaauauuauttauaaatattttaaatgtautaaaaautagtaatguaaagguaguaatgttaguaaaatttaaagagttatauggggtgagtttttuagaattagtaagauuatttaaaagtaataaatuaaugtgttgugattggtgtattgutguatttggauttauauuuagtatagutgauagtataaaaauautattauaauaatattgtttatatttauauattuaaagtttaguatgttuatggggaatggttgtgttautattagtaagatataaatgtggaaaaaatagagaaauaattgaaaaattgutgtutaaautattatgtgtgtutuuaatgtgtatgatgatagaguutuuaaaattgugtagtauaguaguaguattatattggtataaaauaggtatatuaaatattagtgaagtgtatggagauauguuagaatggatauaaagauaaauagtattauaauatagttttaatgattgtauatttgaattatuauagatggtauaatggguutaugataatgauatagtagaugatagtgaaattguatataaatatguauaattgguagauautaatagtaatguaagtguutttutaaaaagtaattuauagguaaaaattgtaaaggattgtguaauaatgtgtagauattataaaugaguagaaaaaaaauaaatgagtatgagtuaatggataaaatatagatgtgatagggtagatgatggaggtgattggaaguaaattgttatgtttttaaggtatuaaggtgtagagtttatgtuatttttaautguattaaaaagatttttguaagguatauutaaaaaaaattguatattautatatggtguagutaauauaggtaaatuattatttggtatgagtttaatgaaatttutguaagggtutgtaatatgttttgtaaattutaaaaguuatttttggttauaauuattaguagatguuaaaataggtatgttagatgatgutauagtguuutgttggaautauatagatgauaatttaagaaatguattggatggaaatttagtttutatggatgtaaaguatagauuattggtauaautaaaatguuutuuattattaattauatutaauattaatgutggtauagattutaggtgguuttatttauataatagattggtggtgtttauatttuutaatgagtttuuatttgaugaaaauggaaatuuagtgtatgaguttaatgataagaautggaaatuutttttutuaaggaugtggtuuagattaagtttguaugaggaugaggauaaggaaaaugatggagaututttguuaaugtttaaatgtgtgtuaggauaaaatautaauauattatgaaaatgatagtauagauutaugtgauuatatagautattggaaauauatguguutagaatgtgutatttattauaagguuagagaaatgggatttaaauatattaauuauuaagtggtguuaauautggutgtatuaaagaataaaguattauaaguaattgaautguaautaaugttagaaauaatatataautuauaatatagtaatgaaaagtggauattauaagaugttaguuttgaagtgtatttaautguauuaauaggatgtataaaaaaauatggatatauagtggaagtguagtttgatggagauatatguaatauaatguattatauaaautggauauatatatatatttgtgaagaaguatuagtaautgtggtagagggtuaagttgautattatggtttatattatgttuatgaaggaataugaauatattttgtguagtttaaagatgatguagaaaaatatagtaaaaataaagtatgggaagttuatgugggtggtuaggtaatattatgtuutauatutgtgtttaguaguaaugaagtatuututuutgaaattattagguaguauttgguuaauuauuuuguugugauuuatauuaaaguugtuguuttggguauugaagaaauauagaugautatuuagugauuaagatuagaguuagauauuggaaauuuutguuauauuautaagttgttguauagagautuagtggauagtgutuuaatuutuautguatttaauagutuauauaaaggauggattaautgtaatagtaauautauauuuatagtauatttaaaaggtgatgutaatautttaaaatgtttaagatatagatttaaaaaguattgtauattgtatautguagtgtugtutauatgguattggauaggauataatgtaaaauataaaagtguaattgttauauttauatatgatagtgaatgguaaugtgauuaatttttgtutuaagttaaaatauuaaaaautattauagtgtutautggatttatgtutatatgauaaatuttgatautguatuuauaauattautggugtgutttttgutttgutttgtgtguttttgtgtgtutguutattaataugtuugutguttttgtutgtgtutauatauauatuattaataatattggtattautattgtggataauaguaguututgugtttaggtgttttattgtatatattatatttgtttatatauuattatttttaatauatauauatguaugutttttaattauataatgtatatgtauataatgtaattgttauatataattgttgtatauuataauttautattttttuttttttattttuatatataatttttttttttgtttgtttgtttgttttttaataaautgttattauttaauaatgugauauaaaugttutguaaaauguauaaaaugtguatuggutauuuaautttataaaauatguaaauagguaggtauatgtuuauutgauattatauutaaggttgaagguaaaautattgutgaauaaatattauaatatggaagtatgggtgtattttttggtgggttaggaattggaauagggtugggtauagguggauguautgggtatattuuattgggaauaagguutuuuauagutauagatauauttgutuutgtaagauuuuutttaauagtagatuutgtggguuuttutgatuuttutatagtttutttagtggaagaaautagttttattgatgutggtguauuaauatutgtauuttuuattuuuuuagatgtatuaggatttagtattautauttuaautgatauuauauutgutatattagatattaataatautgttautautgttautauauataataatuuuautttuautgauuuatutgtattguaguutuuaauauutguagaaautggaggguattttauautttuatuatuuautattagtauauataattatgaagaaattuutatggatauatttattgttaguauaaauuutaauauagtaautagtaguauauuuatauuagggtutuguuuagtgguauguutaggattatatagtuguauaauauaauaggttaaagttgtagauuutguttttgtaauuautuuuautaaauttattauatatgataatuutguatatgaaggtatagatgtggataatauattatatttttutagtaatgataatagtattaatatagutuuagatuutgautttttggatatagttgutttauatagguuaguattaauututaggugtautgguattaggtauagtagaattggtaataaauaaauautaugtautugtagtggaaaatutataggtgutaaggtauattattattatgatttaagtautattgatuutguagaagaaatagaattauaaautataauauuttutauatatautauuauttuauatguaguutuauutauttutattaataatggattatatgatatttatguagatgautttattauagatauttutauaauuuuggtauuatutgtauuututauatutttatuaggttatattuutguaaatauaauaattuuttttggtggtguatauaatattuutttagtatuaggtuutgatatauuuattaatataautgauuaagutuuttuattaattuutatagttuuagggtutuuauaatatauaattattgutgatguaggtgauttttatttauatuutagttattauatgttaugaaaaugaugtaaaugtttauuatattttttttuagatgtututttggutguutagtgagguuautgtutauttguutuutgtuuuagtatutaaggttgtaaguauggatgaatatgttguauguauaaauatatattatuatguaggaauatuuagautauttguagttggauatuuutattttuutattaaaaaauutaauaataauaaaatattagttuutaaagtatuaggattauaatauagggtatttagaatauatttauutgauuuuaataagtttggttttuutgauauutuattttataatuuagatauauaguggutggtttggguutgtgtaggtgttgaggtaggtugtggtuaguuattaggtgtggguattagtgguuatuutttattaaataaattggatgauauagaaaatgutagtguttatguaguaaatguaggtgtggataatagagaatgtatatutatggattauaaauaaauauaattgtgtttaattggttguaaauuauutataggggaauautgggguaaaggatuuuuatgtauuaatgttguagtaaatuuaggtgattgtuuauuattagagttaataaauauagttattuaggatggtgatatggttuatautggutttggtgutatggautttautauattauaggutaauaaaagtgaagttuuautggatatttgtauatutatttguaaatatuuagattatattaaaatggtgtuagaauuatatggugauaguttatttttttatttaugaagggaauaaatgtttgttagauatttatttaatagggutggtautgttggtgaaaatgtauuagaugatttatauattaaaggututgggtutautguaaatttaguuagttuaaattattttuutauauutagtggttutatggttauututgatguuuaaatattuaataaauuttattggttauaaugaguauaggguuauaataatgguatttgttggggtaauuaautatttgttautgttgttgatautauauguagtauaaatatgtuattatgtgutguuatatutauttuagaaautauatataaaaatautaautttaaggagtauutaugauatggggaggaatatgatttauagtttatttttuaautgtguaaaataauuttaautguagaugttatgauatauatauattutatgaattuuautattttggaggautggaattttggtutauaauutuuuuuaggagguauautagaagatauttataggtttgtaauuuagguaattguttgtuaaaaauatauauutuuaguauutaaagaagatgatuuuuttaaaaaatauautttttgggaagtaaatttaaaggaaaagttttutguagauutagatuagtttuutttaggauguaaatttttautauaaguaggattgaagguuaaauuaaaatttauattaggaaaaugaaaagutauauuuauuauutuatutauututauaautgutaaauguaaaaaaugtaagutgtaagtattgtatgtatgttgaattagtgttgtttgttgtgtatatgtttgtatgtguttgtatgtguttgtaaatattaagttgtatgtgtgtttgtatgtatggtataataaauaugtgtgtatgtgtttttaaatguttgtgtaautattgtgtuatguaauataaataaauttattgtttuaauauutautaattgtgttgtggttattuattgtatataaautatatttgutauatuutgtttttgttttatatatautatattttgtaguguuagguuuattttgtaguttuaauugaattuggttguatgutttttgguauaaaatgtgtttttttaaatagttutatgtuaguaautatggtttaaauttgtaugtttuutguttguuatgugtguuaaatuuutgttttuutgauutguautguttguuaauuattuuattgttttttauautguautatgtguaautautgaatuautatgtauattgtgtuatataaaataaatuautatguguuaauguuttauatauugutgttagguauatatttttgguttgttttaautaauutaattguatatttgguataaggtttaaauttutaagguuaautaaatgtuauuutagttuatauatgaautgtgtaaaggttagtuatauattgttuatttgtaaaautguauatgggtgtgtguaaauugattttgggttauauatttauaaguaauttatataataatautaa

SEQ ID NO: 615 - DNA, 7904 bp, Papilloma virus
attataataatttatgtataaaattaagggtgtaattgaaattggttgaattgaaattggttagtataaaagtagatattttatgtattaaaagagaattgtaatgttttaggatttataggagtgatttagaaagttattatagttatgtatagagttgtaaataattatatatgatataatattagaatgtgtgtattgtaagtaatagttattgtgatgtgaggtatatgattttgttttttgggatttatgtatagtatatagagatgggaatttatatgttgtatgtgataaatgtttaaagttttattttaaaattagtgagtatagatattattgttatagtttgtatggaataatattagaatagtaatataataaattgttgtgtgatttgttaattaggtgtattaattgttaaaagttattgtgttttgaagaaaagtaaagatatttggataaaaagtaaagattttataatataaggggttggtggattggttgatgtatgttttgttgtagattattaagaatatgtagagaaatttagttgtaattatgtatggagatatatttatattgtatgaatatatgttagatttgtaattagagataattgatttttattgttatgagtaattaaatgatagtttagaggaggaggatgaaatagatggtttagttggataagtagaattggatagagtttattataatattgtaattttttgttgtaagtgtgattttatgttttggttgtgtgtataaagtatatatgtagatatttgtattttggaagatttgttaatgggtatattaggaattgtgtgttttatttgtttttagaaattataatttattatggttgattttgtaggtattaatggggaagagggtatgggatgtaatggatggttttatgtagaggttgtagtggaaaaaaaaataggggatgttatattagatgatgagaatgaaaatgatagtgatataggtgaagatttggtagattttatagtaaatgataatgattatttaatataggtagaaatagagatagtatatgtgttgtttattgtataggaagtaaaataatatagagatgtagtataggttttaaaatgaaagtatttggtagtttatttagtgatattagtggatgtgtagataataatattagttttagattaaaagttatatgtatagaaaaataaagtagagttgtaaaaaggagattatttgaaagtgaagatagtgggtatggtaatattgaagtggaaatttagtagatgttataggtagaagggtgttatgagattgaaatattatgtagttagtatagtggtggaagtgggggtggttgtagttagtatagtagtggaagtgggggagagggtgttagtgaaagatatattatatgttaaatattatttataaatattttaaatgtattaaaaattagtaatgtaaaggtagtaatgttagtaaaatttaaagagttatatggggtgagttttttagaattagtaagattatttaaaagtaataaattaatgtgttgtgattggtgtattgttgtatttggatttatatttagtatagttgatagtataaaaatattattataataatattgtttatatttatatatttaaagtttagtatgtttatggggaatggttgtgttattattagtaagatataaatgtggaaaaaatagagaaataattgaaaaattgttgtttaaattattatgtgtgtttttaatgtgtatgatgatagagtttttaaaattgtgtagtatagtagtagtattatattggtataaaataggtatattaaatattagtgaagtgtatggagatatgttagaatggatataaagataaatagtattataatatagttttaatgattgtatatttgaattattatagatggtataatgggtttatgataatgatatagtagatgatagtgaaattgtatataaatatgtataattggtagatattaatagtaatgtaagtgtttttttaaaaagtaatttataggtaaaaattgtaaaggattgtgtaataatgtgtagatattataaatgagtagaaaaaaaataaatgagtatgagttaatggataaaatatagatgtgatagggtagatgatggaggtgattggaagtaaattgttatgtttttaaggtattaaggtgtagagtttatgttatttttaattgtattaaaaagatttttgtaaggtatatttaaaaaaaattgtatattattatatggtgtagttaatataggtaaattattatttggtatgagtttaatgaaatttttgtaagggtttgtaatatgttttgtaaattttaaaagttatttttggttataattattagtagatgttaaaataggtatgttagatgatgttatagtgttttgttggaattatatagatgataatttaagaaatgtattggatggaaatttagtttttatggatgtaaagtatagattattggtataattaaaatgttttttattattaattatatttaatattaatgttggtatagattttaggtggttttatttatataatagattggtggtgtttatattttttaatgagtttttatttgatgaaaatggaaatttagtgtatgagtttaatgataagaattggaaatttttttttttaaggatgtggtttagattaagtttgtatgaggatgaggataaggaaaatgatggagattttttgttaatgtttaaatgtgtgttaggataaaatattaatatattatgaaaatgatagtatagatttatgtgattatatagattattggaaatatatgtgtttagaatgtgttatttattataaggttagagaaatgggatttaaatatattaattattaagtggtgttaatattggttgtattaaagaataaagtattataagtaattgaattgtaattaatgttagaaataatatataatttataatatagtaatgaaaagtggatattataagatgttagttttgaagtgtatttaattgtattaataggatgtataaaaaaatatggatatatagtggaagtgtagtttgatggagatatatgtaatataatgtattatataaattggatatatatatatatttgtgaagaagtattagtaattgtggtagagggttaagttgattattatggtttatattatgtttatgaaggaatatgaatatattttgtgtagtttaaagatgatgtagaaaaatatagtaaaaataaagtatgggaagtttatgtgggtggttaggtaatattatgttttatatttgtgtttagtagtaatgaagtatttttttttgaaattattaggtagtatttggttaattattttgttgtgatttatattaaagttgttgttttgggtattgaagaaatatagatgattatttagtgattaagattagagttagatattggaaatttttgttatattattaagttgttgtatagagatttagtggatagtgttttaatttttattgtatttaatagtttatataaaggatggattaattgtaatagtaatattatatttatagtatatttaaaaggtgatgttaatattttaaaatgtttaagatatagatttaaaaagtattgtatattgtatattgtagtgttgtttatatggtattggataggatataatgtaaaatataaaagtgtaattgttatatttatatatgatagtgaatggtaatgtgattaatttttgttttaagttaaaatattaaaaattattatagtgtttattggatttatgtttatatgataaattttgatattgtatttataatattattggtgtgttttttgttttgttttgtgtgtttttgtgtgtttgtttattaatatgtttgttgtttttgtttgtgtttatatatatattattaataatattggtattattattgtggataatagtagtttttgtgtttaggtgttttattgtatatattatatttgtttatatattattatttttaatatatatatatgtatgttttttaattatataatgtatatgtatataatgtaattgttatatataattgttgtatattataatttattatttttttttttttatttttatatataatttttttttttgtttgtttgtttgttttttaataaattgttattatttaataatgtgatataaatgttttgtaaaatgtataaaatgtgtattggttatttaattttataaaatatgtaaataggtaggtatatgtttatttgatattatatttaaggttgaaggtaaaattattgttgaataaatattataatatggaagtatgggtgtattttttggtgggttaggaattggaatagggttgggtataggtggatgtattgggtatattttattgggaataaggttttttatagttatagatatatttgtttttgtaagattttttttaatagtagattttgtgggtttttttgatttttttatagtttttttagtggaagaaattagttttattgatgttggtgtattaatatttgtattttttatttttttagatgtattaggatttagtattattattttaattgatattatatttgttatattagatattaataatattgttattattgttattatatataataattttatttttattgatttatttgtattgtagtttttaatatttgtagaaattggagggtattttatatttttattatttattattagtatatataattatgaagaaatttttatggatatatttattgttagtataaattttaatatagtaattagtagtatatttatattagggttttgtttagtggtatgtttaggattatatagttgtataatataataggttaaagttgtagattttgtttttgtaattatttttattaaatttattatatatgataattttgtatatgaaggtatagatgtggataatatattatatttttttagtaatgataatagtattaatatagttttagattttgattttttggatatagttgttttatataggttagtattaatttttaggtgtattggtattaggtatagtagaattggtaataaataaatattatgtatttgtagtggaaaatttataggtgttaaggtatattattattatgatttaagtattattgattttgtagaagaaatagaattataaattataatattttttatatatattattattttatatgtagttttatttatttttattaataatggattatatgatatttatgtagatgattttattatagatatttttataattttggtattatttgtattttttatatttttattaggttatatttttgtaaatataataattttttttggtggtgtatataatatttttttagtattaggttttgatatatttattaatataattgattaagtttttttattaatttttatagttttagggtttttataatatataattattgttgatgtaggtgatttttatttatattttagttattatatgttatgaaaatgatgtaaatgtttattatatttttttttagatgtttttttggttgtttagtgaggttattgtttatttgttttttgttttagtatttaaggttgtaagtatggatgaatatgttgtatgtataaatatatattattatgtaggaatatttagattatttgtagttggatatttttatttttttattaaaaaatttaataataataaaatattagtttttaaagtattaggattataatatagggtatttagaatatatttatttgattttaataagtttggtttttttgatattttattttataatttagatatatagtggttggtttgggtttgtgtaggtgttgaggtaggttgtggttagttattaggtgtgggtattagtggttattttttattaaataaattggatgatatagaaaatgttagtgtttatgtagtaaatgtaggtgtggataatagagaatgtatatttatggattataaataaatataattgtgtttaattggttgtaaattatttataggggaatattggggtaaaggatttttatgtattaatgttgtagtaaatttaggtgattgtttattattagagttaataaatatagttatttaggatggtgatatggtttatattggttttggtgttatggattttattatattataggttaataaaagtgaagttttattggatatttgtatatttatttgtaaatatttagattatattaaaatggtgttagaattatatggtgatagtttatttttttatttatgaagggaataaatgtttgttagatatttatttaatagggttggtattgttggtgaaaatgtattagatgatttatatattaaaggttttgggtttattgtaaatttagttagtttaaattatttttttatatttagtggttttatggttatttttgatgtttaaatatttaataaattttattggttataatgagtatagggttataataatggtatttgttggggtaattaattatttgttattgttgttgatattatatgtagtataaatatgttattatgtgttgttatatttattttagaaattatatataaaaatattaattttaaggagtatttatgatatggggaggaatatgatttatagtttattttttaattgtgtaaaataattttaattgtagatgttatgatatatatatattttatgaattttattattttggaggattggaattttggtttataattttttttaggaggtatattagaagatatttataggtttgtaatttaggtaattgtttgttaaaaatatatatttttagtatttaaagaagatgatttttttaaaaaatatattttttgggaagtaaatttaaaggaaaagttttttgtagatttagattagttttttttaggatgtaaatttttattataagtaggattgaaggttaaattaaaatttatattaggaaaatgaaaagttatatttattattttatttatttttataattgttaaatgtaaaaaatgtaagttgtaagtattgtatgtatgttgaattagtgttgtttgttgtgtatatgtttgtatgtgtttgtatgtgtttgtaaatattaagttgtatgtgtgtttgtatgtatggtataataaatatgtgtgtatgtgtttttaaatgtttgtgtaattattgtgttatgtaatataaataaatttattgttttaatatttattaattgtgttgtggttatttattgtatataaattatatttgttatattttgtttttgttttatatatattatattttgtagtgttaggtttattttgtagttttaattgaatttggttgtatgttttttggtataaaatgtgtttttttaaatagttttatgttagtaattatggtttaaatttgtatgttttttgtttgttatgtgtgttaaatttttgtttttttgatttgtattgtttgttaattattttattgttttttatattgtattatgtgtaattattgaattattatgtatattgtgttatataaaataaattattatgtgttaatgttttatatattgttgttaggtatatatttttggtttgttttaattaatttaattgtatatttggtataaggtttaaatttttaaggttaattaaatgttattttagtttatatatgaattgtgtaaaggttagttatatattgtttatttgtaaaattgtatatgggtgtgtgtaaattgattttgggttatatatttataagtaatttatataataatattaa

SEQ ID NO: 616 - DNA, 7904 bp, Papilloma virus
tgatgttattaagtacatattttgattcccgcattggctttagccaacttggctttggccaatcatattttcgtctgtaaaatacgtggttttctcttgacgttacaaagtcctgggtgtcctcgctgggtctttcaatggtgtcaatacgtgtctcgacgtttgttgatatgtactatattataatcttacacacatgacgttcgttgtcaatgacgctgcactccatatactgaaacgaaaagccctaaatacgtatcatatatctctacccttaggtatacgacatacactatttacaaatttcaaaataagattttaatcactcatatctgtaataacaatatcaaacataccttgttgtaatcttgtcgttatgttgtttggcaacacactaaacaattaatccacataattgacagttttcggtgacacaggacttcttttcgtttctgtagacctgtttttcgtttctaaggtattatattccccagccacctggccagctacatacagaacaacgtctagtagttcttgtgcatctctttgggtcgacattagtacgtacctctatgtggatgtaacgtacttatatacaatctaaacgttggtctctgttgactagagatgacaatactcgttaatttactgtcgagtctcctcctcctactttatctaccaggtcgacctgttcgtcttggcctgtctcgggtaatgttataacattggaaaacaacgttcacactgagatgcgaagccaacacgcatgtttcgtgtgtgcatctgtaagcatgaaaccttctggacaattacccgtgtgatccttaacacacggggtagacaagagtctttggtattagatggtaccgactaggacgtccatggttaccccttctcccatgccctacattacctaccaaaatacatctccgacatcacctttttttttgtcccctacgatatagtctactgctcttgcttttactgtcactatgtccacttctaaaccatctaaaatatcatttactattactaataaattgtgtccgtctttgtctctgtcgtgtacgcaacaaatgacgtgtccttcgttttgttgtatctctacgtcatgtccaagattttgctttcataaaccatcaggtgaatcactataatcacctacacatctgttattataatcaggatctaattttcgatatacatatctttttgtttcatctcgacgtttttcctctaataaactttcgcttctgtcgcccataccgttatgacttcacctttgagtcgtctacaatgtccatcttcccgcggtactctgactttgtggtacatcagtcatatcaccaccttcacccccaccaacgtcagtcatgtcatcaccttcaccccctctcccacaatcactttctgtgtgatatacggtttgtggtgaatgtttataaaatttacatgatttttgatcattacgtttccgtcgttacaatcgttttaaatttctcaatatgccccactcaaaaagtcttaatcattctggtaaattttcattatttagttgcacaacgctaaccacataacgacgtaaacctgaatgtgggtcatatcgactgtcatatttttgtgataatgttgttataacaaatataaatgtgtaagtttcaaatcgtacaagtaccccttaccaacacaatgataatcattctatatttacaccttttttatctctttgttaactttttaacgacagatttgataatacacacagaggttacacatactactatctcggaggttttaacgcatcatgtcgtcgtcgtaatataaccatattttgtccatatagtttataatcacttcacatacctctgtgcggtcttacctatgtttctgtttgtcataatgttgtatcaaaattactaacatgtaaacttaatagtgtctaccatgttacccggatgctattactgtatcatctgctatcactttaacgtatatttatacgtgttaaccgtctgtgattatcattacgttcacggaaagatttttcattaagtgtccgtttttaacatttcctaacacgttgttacacatctgtaatatttgctcgtcttttttttgtttactcatactcagttacctattttatatctacactatcccatctactacctccactaaccttcgtttaacaatacaaaaattccatagttccacatctcaaatacagtaaaaattgacgtaatttttctaaaaacgttccgtatggattttttttaacgtataatgatataccacgtcgattgtgtccatttagtaataaaccatactcaaattactttaaagacgttcccagacattatacaaaacatttaagattttcggtaaaaaccaatgttggtaatcgtctacggttttatccatacaatctactacgatgtcacgggacaaccttgatgtatctactgttaaattctttacgtaacctacctttaaatcaaagatacctacatttcgtatctggtaaccatgttgattttacgggaggtaataattaatgtagattgtaattacgaccatgtctaagatccaccggaataaatgtattatctaaccaccacaaatgtaaaggattactcaaaggtaaactgcttttgcctttaggtcacatactcgaattactattcttgacctttaggaaaaagagttcctgcaccaggtctaattcaaacgtgctcctgctcctgttccttttgctacctctgagaaacggttgcaaatttacacacagtcctgttttatgattgtgtaatacttttactatcatgtctggatgcactggtatatctgataacctttgtgtacgcggatcttacacgataaataatgttccggtctctttaccctaaatttgtataattggtggttcaccacggttgtgaccgacatagtttcttatttcgtaatgttcgttaacttgacgttgattgcaatctttgttatatattgagtgttatatcattacttttcacctgtaatgttctgcaatcggaacttcacataaattgacgtggttgtcctacatatttttttgtacctatatgtcaccttcacgtcaaactacctctgtatacgttatgttacgtaatatgtttgacctgtgtatatatataaacacttcttcgtagtcattgacaccatctcccagttcaactgataataccaaatataatacaagtacttccttatgcttgtataaaacacgtcaaatttctactacgtctttttatatcatttttatttcatacccttcaagtacgcccaccagtccattataatacaggatgtagacacaaatcgtcgttgcttcataggagaggactttaataatccgtcgtgaaccggttggtggggcggcgctgggtatggtttcggcagcggaacccgtggcttctttgtgtctgctgataggtcgctggttctagtctcggtctgtggcctttggggacggtgtggtgattcaacaacgtgtctctgagtcacctgtcacgaggttaggagtgacgtaaattgtcgagtgtgtttcctgcctaattgacattatcattgtgatgtgggtatcatgtaaattttccactacgattatgaaattttacaaattctatatctaaatttttcgtaacatgtaacatatgacgtcacagcagatgtaccgtaacctgtcctgtattacattttgtattttcacgttaacaatgtgaatgtatactatcacttaccgttgcactggttaaaaacagagttcaattttatggtttttgataatgtcacagatgacctaaatacagatatactgtttagaactatgacgtaggtgttgtaatgaccgcacgaaaaacgaaacgaaacacacgaaaacacacagacggataattatgcaggcgacgaaaacagacacagatgtatgtgtagtaattattataaccataatgataacacctattgtcgtcggagacgcaaatccacaaaataacatatataatataaacaaatatatggtaataaaaattatgtatgtgtacgtgcgaaaaattaatgtattacatatacatgtattacattaacaatgtatattaacaacatatggtattgaatgataaaaaagaaaaaataaaagtatatattaaaaaaaaaaacaaacaaacaaacaaaaaattatttgacaataatgaattgttacgctgtgtttgcaagacgttttgcgtgttttgcacgtagccgatgggttgaaatattttgtacgtttgtccgtccatgtacaggtggactgtaatatggattccaacttccgttttgataacgacttgtttataatgttataccttcatacccacataaaaaaccacccaatccttaaccttgtcccagcccatgtccgcctgcgtgacccatataaggtaacccttgttccggagggtgtcgatgtctatgtgaacgaggacattctgggggaaattgtcatctaggacacccgggaagactaggaagatatcaaagaaatcaccttctttgatcaaaataactacgaccacgtggttgtagacatggaaggtaagggggtctacatagtcctaaatcataatgatgaagttgactatggtgtggacgatataatctataattattatgacaatgatgacaatgatgtgtattattagggtgaaagtgactgggtagacataacgtcggaggttgtggacgtctttgacctcccgtaaaatgtgaaagtagtaggtgataatcatgtgtattaatacttctttaaggatacctatgtaaataacaatcgtgtttgggattgtgtcattgatcatcgtgtgggtatggtcccagagcgggtcaccgtgcggatcctaatatatcagcgtgttgtgttgtccaatttcaacatctgggacgaaaacattggtgagggtgatttgaataatgtatactattaggacgtatacttccatatctacacctattatgtaatataaaaagatcattactattatcataattatatcgaggtctaggactgaaaaacctatatcaacgaaatgtatccggtcgtaattggagatccgcatgaccgtaatccatgtcatcttaaccattatttgtttgtgatgcatgagcatcaccttttagatatccacgattccatgtaataataatactaaattcatgataactaggacgtcttctttatcttaatgtttgatattgtggaagatgtatatgatggtgaagtgtacgtcggagtggatgaagataattattacctaatatactataaatacgtctactgaaataatgtctatgaagatgttggggccatggtagacatgggagatgtagaaatagtccaatataaggacgtttatgttgttaaggaaaaccaccacgtatgttataaggaaatcatagtccaggactatatgggtaattatattgactggttcgaggaagtaattaaggatatcaaggtcccagaggtgttatatgttaataacgactacgtccactgaaaataaatgtaggatcaataatgtacaatgcttttgctgcatttgcaaatggtataaaaaaaagtctacagagaaaccgacggatcactccggtgacagatgaacggaggacagggtcatagattccaacattcgtgcctacttatacaacgtgcgtgtttgtatataatagtacgtccttgtaggtctgatgaacgtcaacctgtagggataaaaggataattttttggattgttattgttttataatcaaggatttcatagtcctaatgttatgtcccataaatcttatgtaaatggactggggttattcaaaccaaaaggactgtggagtaaaatattaggtctatgtgtcgccgaccaaacccggacacatccacaactccatccagcaccagtcggtaatccacacccgtaatcaccggtaggaaataatttatttaacctactgtgtcttttacgatcacgaatacgtcgtttacgtccacacctattatctcttacatatagatacctaatgtttgtttgtgttaacacaaattaaccaacgtttggtggatatccccttgtgaccccgtttcctaggggtacatggttacaacgtcatttaggtccactaacaggtggtaatctcaattatttgtgtcaataagtcctaccactataccaagtatgaccgaaaccacgatacctgaaatgatgtaatgtccgattgttttcacttcaaggtgacctataaacatgtagataaacgtttataggtctaatataattttaccacagtcttggtataccgctgtcgaataaaaaaataaatgcttcccttgtttacaaacaatctgtaaataaattatcccgaccatgacaaccacttttacatggtctgctaaatatgtaatttccgagacccagatgacgtttaaatcggtcaagtttaataaaaggatgtggatcaccaagataccaatggagactacgggtttataagttatttggaataaccaatgttgctcgtgtcccggtgttattaccgtaaacaaccccattggttgataaacaatgacaacaactatgatgtgcgtcatgtttatacagtaatacacgacggtatagatgaagtctttgatgtatatttttatgattgaaattcctcatggatgctgtacccctccttatactaaatgtcaaataaaaagttgacacgttttattggaattgacgtctgcaatactgtatgtatgtaagatacttaaggtgataaaacctcctgaccttaaaaccagatgttggagggggtcctccgtgtgatcttctatgaatatccaaacattgggtccgttaacgaacagtttttgtatgtggaggtcgtggatttcttctactaggggaattttttatgtgaaaaacccttcatttaaatttccttttcaaaagacgtctggatctagtcaaaggaaatcctgcgtttaaaaatgatgttcgtcctaacttccggtttggttttaaatgtaatccttttgcttttcgatgtgggtggtggagtagatggagatgttgacgatttgcgttttttgcattcgacattcataacatacatacaacttaatcacaacaaacaacacatatacaaacatacacgaacatacacgaacatttataattcaacatacacacaaacatacataccatattatttgtgcacacatacacaaaaatttacgaacacattgataacacagtacgttgtatttatttgaataacaaagttgtggatgattaacacaacaccaataagtaacatatatttgatataaacgatgtaggacaaaaacaaaatatatatgatataaaacatcgcggtccgggtaaaacatcgaagttggcttaagccaacgtacgaaaaaccgtgttttacacaaaaaaatttatcaagatacagtcgttgataccaaatttgaacatgcaaaggacgaacggtacgcacggtttagggacaaaaggactggacgtgacgaacggttggtaaggtaacaaaaaatgtgacgtgatacacgttgatgacttagtgatacatgtaacacagtatattttatttagtgatacgcggttgcggaatgtatggcgacaatccgtgtataaaaaccgaacaaaattgattggattaacgtataaaccgtattccaaatttgaagattccggttgatttacagtgggatcaagtatgtacttgacacatttccaatcagtatgtaacaagtaaacattttgacgtgtacccacacacgtttggctaaaacccaatgtgtaaatgttcgttgaatatattattatgatt

SEQ ID NO: 617 - DNA, 7904 bp, Papilloma virus
ttagtattattatataagttguttgtaaatgtgtaauuuaaaatuggtttguauauauuuatgtguagttttauaaatgaauaatgtatgautaauutttauauagttuatgtatgaautagggtgauatttagttgguuttagaagtttaaauuttatguuaaatatguaattaggttagttaaaauaaguuaaaaatatgtguutaauaguggtatgtaaggugttgguguatagtgatttattttatatgauauaatgtauatagtgattuagtagttguauatagtguagtgtaaaaaauaatggaatggttgguaaguagtguaggtuaggaaaauagggatttgguauguatgguaaguaggaaaugtauaagtttaaauuatagttgutgauatagaautatttaaaaaaauauattttgtguuaaaaaguatguaauugaattuggttgaagutauaaaatggguutggugutauaaaatatagtatatataaaauaaaaauaggatgtaguaaatatagtttatatauaatgaataauuauaauauaattagtaggtgttgaaauaataagtttatttatgttguatgauauaatagttauauaaguatttaaaaauauatauauaugtgtttattatauuatauatauaaauauauatauaauttaatatttauaaguauatauaaguauatauaaauatatauauaauaaauaauautaattuaauatauatauaatauttauaguttaugttttttgugtttaguagttgtagaggtagatgaggtggtgggtgtaguttttugttttuutaatgtaaattttggtttgguuttuaatuutguttgtagtaaaaatttgugtuutaaaggaaautgatutaggtutguagaaaauttttuutttaaatttauttuuuaaaaagtgtattttttaaggggatuatuttutttaggtgutggaggtgtatgtttttgauaaguaattguutgggttauaaauutataagtatuttutagtgtguutuutgggggaggttgtagauuaaaattuuagtuutuuaaaatagtggaattuatagaatgtatgtatgtuataaugtutguagttaaggttattttguauagttgaaaaataaautgtaaatuatattuutuuuuatgtugtaggtautuuttaaagttagtatttttatatgtagtttutgaagtagatatgguaguauataatgauatatttgtautgugtgtagtatuaauaauagtaauaaatagttggttauuuuaauaaatguuattattgtgguuutgtgutugttgtaauuaataaggtttattgaatatttggguatuagaggtaauuatagaauuautaggtgtaggaaaataatttgaautggutaaatttguagtagauuuagaguutttaatgtataaatugtutggtauattttuauuaauagtauuaguuutattaaataaatgtutaauaaauatttgttuuuttugtaaataaaaaaataagutgtuguuatatggttutgauauuattttaatataatutggatatttguaaatagatgtauaaatatuuagtggaauttuauttttgttaguutgtaatgtagtaaagtuuataguauuaaaguuagtatgaauuatatuauuatuutgaataautgtgtttattaaututaatggtggauaatuauutggatttautguaauattggtauatggggatuutttguuuuagtgttuuuutataggtggtttguaauuaattaaauauaattgtgtttgtttgtaatuuatagatatauattututattatuuauauutguatttgutguataaguautaguattttutgtgtuatuuaatttatttaataaaggatgguuautaatguuuauauutaatggutgauuaugauutauutuaauauutauauagguuuaaauuaguugutgtgtatutggattataaaatgaggtgtuaggaaaauuaaauttattggggtuaggtaaatgtattutaaatauuutgtattgtaatuutgatautttaggaautaatattttgttattgttaggttttttaataggaaaatagggatgtuuaautguaagtagtutggatgttuutguatgataatatatgtttgtgugtguaauatattuatuugtguttauaauuttagatautgggauaggagguaagtagauagtgguutuautagguaguuaaagagauatutgaaaaaaaatatggtaaaugtttaugtugttttugtaauatgtaataautaggatgtaaataaaagtuauutguatuaguaataattgtatattgtggagauuutggaautataggaattaatgaaggaguttggtuagttatattaatgggtatatuaggauutgatautaaaggaatattgtatguauuauuaaaaggaattgttgtatttguaggaatataauutgataaagatgtagagggtauagatggtauuggggttgtagaagtatutgtaataaagtuatutguataaatatuatataatuuattattaatagaagtaggtgaggutguatgtgaagtggtagtatatgtagaaggtgttatagtttgtaattutatttuttutguaggatuaatagtauttaaatuataataataatgtauuttaguauutatagattttuuautaugagtaugtagtgtttgtttattauuaattutautgtauutaatguuagtauguutagaggttaatgutgguutatgtaaaguaautatatuuaaaaagtuaggatutggagutatattaatautattatuattautagaaaaatataatgtattatuuauatutatauuttuatatguaggattatuatatgtaataagtttagtgggagtggttauaaaaguagggtutauaautttaauutgttgtgttgtgugautatataatuutaggugtguuautgggugagauuutggtatgggtgtgutautagttautgtgttagggtttgtgutaauaataaatgtatuuataggaatttuttuataattatgtgtautaatagtggatgatgaaagtgtaaaatguuutuuagtttutguaggtgttggaggutguaatauagatgggtuagtgaaagtgggattattatgtgtagtaauagtagtaauagtattattaatatutaatataguaggtgtggtatuagttgaagtagtaatautaaatuutgatauatutgggggaatggaaggtauagatgttggtguauuaguatuaataaaautagtttuttuuautaaagaaautatagaaggatuagaaggguuuauaggatutautgttaaagggggtuttauaggaguaagtgtatutgtagutgtgggagguuttgttuuuaatggaatatauuuagtgugtuuguutgtauuugauuutgttuuaattuutaauuuauuaaaaaatauauuuatauttuuatattgtaatatttgttuaguaatagttttguuttuaauuttaggtataatgtuaggtggauatgtauutguutgtttguatgttttataaagttgggtaguugatguaugttttgtgugttttguagaaugtttgtgtuguattgttaagtaataauagtttattaaaaaauaaauaaauaaauaaaaaaaaaaattatatatgaaaataaaaaagaaaaaatagtaagttatggtatauaauaattatatgtaauaattauattatgtauatatauattatgtaattaaaaagugtguatgtgtatgtattaaaaataatggtatataaauaaatataatatatauaataaaauauutaaauguagaggutgutgttatuuauaatagtaatauuaatattattaatgatgtgtatgtagauauagauaaaaguaguggaugtattaatagguagauauauaaaaguauauaaaguaaaguaaaaaguauguuagtaatgttgtggatguagtatuaagatttgtuatatagauataaatuuagtagauautgtaatagtttttggtattttaauttgagauaaaaattggtuaugttguuattuautatuatatgtaagtgtaauaattguauttttatgttttauattatgtuutgtuuaatguuatgtagaugauautguagtatauaatgtauaatgutttttaaatutatatuttaaauattttaaagtattaguatuauuttttaaatgtautatgggtgtagtgttautattauagttaatuugtuutttgtgtgagutgttaaatguagtgaggattggaguautgtuuautgagtututgtguaauaauttagtggtgtgguaggggtttuuggtgtutggututgatuttggtugutggatagtugtutgtgtttuttuggtguuuaaggugauggutttggtatgggtugugguggggtggttgguuaagtgutguutaataatttuaggagaggatauttugttgutgutaaauauagatgtaggauataatattauutgauuauuuguatgaauttuuuatautttatttttautatatttttutguatuatutttaaautguauaaaatatgttugtattuuttuatgaauataatataaauuataatagtuaauttgauuututauuauagttautgatguttuttuauaaatatatatatgtgtuuagtttgtataatguattgtattguatatgtutuuatuaaautguauttuuautgtatatuuatgtttttttatauatuutgttggtguagttaaatauauttuaaggutaaugtuttgtaatgtuuauttttuattautatattgtgagttatatattgtttutaaugttagttguagttuaattguttgtaatgutttattutttgatauaguuagtgttgguauuauttggtggttaatatgtttaaatuuuatttututgguuttgtaataaataguauattutagguguatgtgtttuuaatagtutatatggtuaugtaggtutgtautatuattttuataatgtgttagtattttgtuutgauauauatttaaaugttgguaaagagtutuuatugttttuuttgtuutugtuutugtguaaauttaatutggauuaugtuuttgagaaaaaggatttuuagttuttatuattaagutuatauautggatttuugttttugtuaaatggaaautuattaggaaatgtaaauauuauuaatutattatgtaaataagguuauutagaatutgtauuaguattaatgttagatgtaattaataatggaggguattttagttgtauuaatggtutatgutttauatuuatagaaautaaatttuuatuuaatguatttuttaaattgtuatutatgtagttuuaauaggguautgtaguatuatutaauatauutattttgguatutgutaatggttgtaauuaaaaatgguttttagaatttauaaaauatattauagauuuttguagaaatttuattaaautuatauuaaataatgatttauutgtgttagutguauuatatagtaatatguaattttttttaggtatguuttguaaaaatutttttaatguagttaaaaatgauataaaututauauuttgatauuttaaaaauataauaatttguttuuaatuauutuuatuatutauuutatuauatutatattttatuuattgautuatautuatttgttttttttutgutugtttataatgtutauauattgttguauaatuutttauaatttttguutgtgaattautttttagaaagguauttguattautattagtgtutguuaattgtguatatttatatguaatttuautatugtutautatgtuattatugtagguuuattgtauuatutgtgataattuaaatgtauaatuattaaaautatgttgtaatautgtttgtutttgtatuuattutggugtgtutuuatauauttuautaatatttgatatauutgttttatauuaatataatgutgutgutgtautauguaattttggaggututatuatuatauauattggagauauauataatagtttagauaguaatttttuaattgtttututattttttuuauatttatatuttautaatagtaauauaauuattuuuuatgaauatgutaaautttgaatgtgtaaatataaauaatattgttgtaatagtgtttttatautgtuagutatautgggtgtaagtuuaaatguaguaatauauuaatuguaauaugttgatttattauttttaaatggtuttautaattutgaaaaautuauuuugtataaututttaaattttgutaauattgutguutttguattautagtttttagtauatttaaaatatttgtaagtggtgtttgguatatagtgtgtutttuautaauauuututuuuuuauttuuautautgtautgautguaauuauuuuuauttuuauuautatautgautauatggtgtttuagtutuatgguguuuttutauutgtaauatutgutgagtttuuauttuagtattguuatauuugutgtuttugutttuaaataatutuutttttguagututautttgtttttutatauatataguttttaatutaggautaatattattgtutauauatuuautaatatuautaagtggautauuaaatautttugttttagaauutgtautguatututatgttgttttguttuutgtguagtaaauaauguatgtgutgtututgtttutguutgtgttaaataatuattatuatttautataaaatutauuaaatuttuauutgtatuautgtuattttugttutugtuatutgatataguatuuuutgtttttttttuuautauaguututauataaaauuatuuattauatuuugtauuututtuuuuattggtauutguaggatuaguuatggtagattatggtttutgagaauagatgggguauauaattuutagtgtguuuattaauaggtuttuuaaagtaugaatgtutaugtgtgtgutttgtauguauaauugaagugtagagtuauauttguaauaaaaggttauaatattgtaatgggututgtuuggttutguttgtuuagutggauuatutatttuatuutuutuututgagutgtuatttaattgutuataauagtagagatuagttgtututggttguaaatutaauatatattuatguaatgtaggtgtatutuuatguatgattauagutgggtttututaugtgttuttgatgatutguaauaagauatauatugauuggtuuauugauuuuttatattatggaatutttgutttttgtuuagatgtutttguttttuttuaggauauagtgguttttgauagttaatauauutaattaauaaatuauauaauggtttgttgtattgutgttutaatgttgttuuatauaaautataauaataatgtutatautuautaattttagaataaaautttaaauatttatuauatauaguatatggattuuuatututatatautatguataaatuuugaaaaguaaagtuatatauutuaugtuguagtaautgttguttguagtauauauattutaatattatatuatgtatagttgtttguagututgtguataautgtggtaautttutgggtugutuutgtgggtuutgaaauattguagttututtttggtguataaaatgtutguttttatautaauuggtttuggttuaauugatttuggttauguuuttagttttatauatgaattattgtagt

SEQ ID NO: 618 - DNA, 7904 bp, Papilloma virus
tgatgttattaagtatatattttgatttttgtattggttttagttaatttggttttggttaattatatttttgtttgtaaaatatgtggtttttttttgatgttataaagttttgggtgtttttgttgggttttttaatggtgttaatatgtgttttgatgtttgttgatatgtattatattataattttatatatatgatgtttgttgttaatgatgttgtattttatatattgaaatgaaaagttttaaatatgtattatatatttttatttttaggtatatgatatatattatttataaattttaaaataagattttaattatttatatttgtaataataatattaaatatattttgttgtaattttgttgttatgttgtttggtaatatattaaataattaatttatataattgatagtttttggtgatataggatttttttttgtttttgtagatttgttttttgtttttaaggtattatattttttagttatttggttagttatatatagaataatgtttagtagtttttgtgtatttttttgggttgatattagtatgtatttttatgtggatgtaatgtatttatatataatttaaatgttggtttttgttgattagagatgataatatttgttaatttattgttgagttttttttttttattttatttattaggttgatttgtttgttttggtttgttttgggtaatgttataatattggaaaataatgtttatattgagatgtgaagttaatatgtatgttttgtgtgtgtatttgtaagtatgaaattttttggataattatttgtgtgatttttaatatatggggtagataagagtttttggtattagatggtattgattaggatgtttatggttatttttttttttatgttttatattatttattaaaatatatttttgatattatttttttttttgttttttatgatatagtttattgtttttgtttttattgttattatgtttatttttaaattatttaaaatattatttattattattaataaattgtgtttgtttttgtttttgttgtgtatgtaataaatgatgtgttttttgttttgttgtatttttatgttatgtttaagattttgtttttataaattattaggtgaattattataattatttatatatttgttattataattaggatttaatttttgatatatatatttttttgttttattttgatgttttttttttaataaatttttgtttttgttgtttatattgttatgattttatttttgagttgtttataatgtttatttttttgtggtattttgattttgtggtatattagttatattattatttttatttttattaatgttagttatgttattatttttatttttttttttataattattttttgtgtgatatatggtttgtggtgaatgtttataaaatttatatgatttttgattattatgtttttgttgttataattgttttaaattttttaatatgttttatttaaaaagttttaattattttggtaaatttttattatttagttgtataatgttaattatataatgatgtaaatttgaatgtgggttatattgattgttatatttttgtgataatgttgttataataaatataaatgtgtaagttttaaattgtataagtattttttattaatataatgataattattttatatttatattttttttatttttttgttaattttttaatgatagatttgataatatatatagaggttatatatattattattttggaggttttaatgtattatgttgttgttgtaatataattatattttgtttatatagtttataattattttatatatttttgtgtggttttatttatgtttttgtttgttataatgttgtattaaaattattaatatgtaaatttaatagtgtttattatgttatttggatgttattattgtattatttgttattattttaatgtatatttatatgtgttaattgtttgtgattattattatgtttatggaaagattttttattaagtgtttgtttttaatattttttaatatgttgttatatatttgtaatatttgtttgttttttttttgtttatttatatttagttatttattttatatttatattattttatttattatttttattaatttttgtttaataatataaaaattttatagttttatattttaaatatagtaaaaattgatgtaatttttttaaaaatgttttgtatggattttttttaatgtataatgatatattatgttgattgtgtttatttagtaataaattatatttaaattattttaaagatgtttttagatattatataaaatatttaagatttttggtaaaaattaatgttggtaattgtttatggttttatttatataatttattatgatgttatgggataattttgatgtatttattgttaaattttttatgtaatttatttttaaattaaagatatttatattttgtatttggtaattatgttgattttatgggaggtaataattaatgtagattgtaattatgattatgtttaagatttattggaataaatgtattatttaattattataaatgtaaaggattatttaaaggtaaattgtttttgtttttaggttatatatttgaattattatttttgatttttaggaaaaagagtttttgtattaggtttaatttaaatgtgtttttgtttttgttttttttgttatttttgagaaatggttgtaaatttatatatagttttgttttatgattgtgtaatatttttattattatgtttggatgtattggtatatttgataatttttgtgtatgtggattttatatgataaataatgttttggtttttttattttaaatttgtataattggtggtttattatggttgtgattgatatagttttttattttgtaatgtttgttaatttgatgttgattgtaatttttgttatatattgagtgttatattattattttttatttgtaatgttttgtaattggaattttatataaattgatgtggttgttttatatatttttttgtatttatatgttatttttatgttaaattatttttgtatatgttatgttatgtaatatgtttgatttgtgtatatatataaatatttttttgtagttattgatattattttttagtttaattgataatattaaatataatataagtatttttttatgtttgtataaaatatgttaaatttttattatgtttttttatattatttttattttatattttttaagtatgtttattagtttattataatataggatgtagatataaattgttgttgttttataggagaggattttaataatttgttgtgaattggttggtggggtggtgttgggtatggttttggtagtggaatttgtggtttttttgtgtttgttgataggttgttggttttagttttggtttgtggtttttggggatggtgtggtgatttaataatgtgtttttgagttatttgttatgaggttaggagtgatgtaaattgttgagtgtgttttttgtttaattgatattattattgtgatgtgggtattatgtaaattttttattatgattatgaaattttataaattttatatttaaattttttgtaatatgtaatatatgatgttatagtagatgtattgtaatttgttttgtattatattttgtatttttatgttaataatgtgaatgtatattattatttattgttgtattggttaaaaatagagtttaattttatggtttttgataatgttatagatgatttaaatatagatatattgtttagaattatgatgtaggtgttgtaatgattgtatgaaaaatgaaatgaaatatatgaaaatatatagatggataattatgtaggtgatgaaaatagatatagatgtatgtgtagtaattattataattataatgataatatttattgttgttggagatgtaaatttataaaataatatatataatataaataaatatatggtaataaaaattatgtatgtgtatgtgtgaaaaattaatgtattatatatatatgtattatattaataatgtatattaataatatatggtattgaatgataaaaaagaaaaaataaaagtatatattaaaaaaaaaaataaataaataaataaaaaattatttgataataatgaattgttatgttgtgtttgtaagatgttttgtgtgttttgtatgtagttgatgggttgaaatattttgtatgtttgtttgtttatgtataggtggattgtaatatggattttaatttttgttttgataatgatttgtttataatgttatatttttatatttatataaaaaattatttaatttttaattttgttttagtttatgtttgtttgtgtgatttatataaggtaatttttgttttggagggtgttgatgtttatgtgaatgaggatattttgggggaaattgttatttaggatatttgggaagattaggaagatattaaagaaattattttttttgattaaaataattatgattatgtggttgtagatatggaaggtaagggggtttatatagttttaaattataatgatgaagttgattatggtgtggatgatataatttataattattatgataatgatgataatgatgtgtattattagggtgaaagtgattgggtagatataatgttggaggttgtggatgtttttgattttttgtaaaatgtgaaagtagtaggtgataattatgtgtattaatatttttttaaggatatttatgtaaataataattgtgtttgggattgtgttattgattattgtgtgggtatggttttagagtgggttattgtgtggattttaatatattagtgtgttgtgttgtttaattttaatatttgggatgaaaatattggtgagggtgatttgaataatgtatattattaggatgtatatttttatatttatatttattatgtaatataaaaagattattattattattataattatattgaggtttaggattgaaaaatttatattaatgaaatgtatttggttgtaattggagatttgtatgattgtaatttatgttattttaattattatttgtttgtgatgtatgagtattattttttagatatttatgattttatgtaataataatattaaatttatgataattaggatgttttttttattttaatgtttgatattgtggaagatgtatatgatggtgaagtgtatgttggagtggatgaagataattattatttaatatattataaatatgtttattgaaataatgtttatgaagatgttggggttatggtagatatgggagatgtagaaatagtttaatataaggatgtttatgttgttaaggaaaattattatgtatgttataaggaaattatagtttaggattatatgggtaattatattgattggtttgaggaagtaattaaggatattaaggttttagaggtgttatatgttaataatgattatgtttattgaaaataaatgtaggattaataatgtataatgtttttgttgtatttgtaaatggtataaaaaaaagtttatagagaaattgatggattattttggtgatagatgaatggaggatagggttatagattttaatatttgtgtttatttatataatgtgtgtgtttgtatataatagtatgtttttgtaggtttgatgaatgttaatttgtagggataaaaggataattttttggattgttattgttttataattaaggattttatagttttaatgttatgttttataaattttatgtaaatggattggggttatttaaattaaaaggattgtggagtaaaatattaggtttatgtgttgttgattaaatttggatatatttataattttatttagtattagttggtaatttatatttgtaattattggtaggaaataatttatttaatttattgtgttttttatgattatgaatatgttgtttatgtttatatttattattttttatatatagatatttaatgtttgtttgtgttaatataaattaattaatgtttggtggatatttttttgtgattttgttttttaggggtatatggttataatgttatttaggtttattaataggtggtaattttaattatttgtgttaataagttttattattatattaagtatgattgaaattatgatatttgaaatgatgtaatgtttgattgtttttattttaaggtgatttataaatatgtagataaatgtttataggtttaatataattttattatagttttggtatattgttgttgaataaaaaaataaatgttttttttgtttataaataatttgtaaataaattattttgattatgataattatttttatatggtttgttaaatatgtaatttttgagatttagatgatgtttaaattggttaagtttaataaaaggatgtggattattaagatattaatggagattatgggtttataagttatttggaataattaatgttgtttgtgttttggtgttattattgtaaataattttattggttgataaataatgataataattatgatgtgtgttatgtttatatagtaatatatgatggtatagatgaagtttttgatgtatatttttatgattgaaattttttatggatgttgtatttttttttatattaaatgttaaataaaaagttgatatgttttattggaattgatgtttgtaatattgtatgtatgtaagatatttaaggtgataaaattttttgattttaaaattagatgttggagggggttttttgtgtgattttttatgaatatttaaatattgggtttgttaatgaatagtttttgtatgtggaggttgtggattttttttattaggggaattttttatgtgaaaaattttttatttaaattttttttttaaaagatgtttggatttagttaaaggaaattttgtgtttaaaaatgatgtttgttttaatttttggtttggttttaaatgtaatttttttgttttttgatgtgggtggtggagtagatggagatgttgatgatttgtgttttttgtatttgatatttataatatatatataatttaattataataaataatatatatataaatatatatgaatatatatgaatatttataatttaatatatatataaatatatatattatattatttgtgtatatatatataaaaatttatgaatatattgataatatagtatgttgtatttatttgaataataaagttgtggatgattaatataatattaataagtaatatatatttgatataaatgatgtaggataaaaataaaatatatatgatataaaatattgtggtttgggtaaaatattgaagttggtttaagttaatgtatgaaaaattgtgttttatataaaaaaatttattaagatatagttgttgatattaaatttgaatatgtaaaggatgaatggtatgtatggtttagggataaaaggattggatgtgatgaatggttggtaaggtaataaaaaatgtgatgtgatatatgttgatgatttagtgatatatgtaatatagtatattttatttagtgatatgtggttgtggaatgtatggtgataatttgtgtataaaaattgaataaaattgattggattaatgtataaattgtattttaaatttgaagattttggttgatttatagtgggattaagtatgtatttgatatatttttaattagtatgtaataagtaaatattttgatgtgtatttatatatgtttggttaaaatttaatgtgtaaatgtttgttgaatatattattatgatt

SEQ ID NO: 619 - DNA, 7857 bp, Papilloma virus
attaatacttttaacaattgtagtatataaaaaagggagtaaccgaaaacggtcgggaccgaaaacggtgtatataaaagatgtgagaaacacaccacaatactatggcgcgctttgaggatccaacacggcgaccctacaagctacctgatctgtgcacggaactgaacacttcactgcaagacatagaaataacctgtgtatattgcaagacagtattggaacttacagaggtatttgaatttgcatttaaagatttatttgtggtgtatagagacagtataccccatgctgcatgccataaatgtatagatttttattctagaattagagaattaagacattattcagactctgtgtatggagacacattggaaaaactaactaacactgggttatacaatttattaataaggtgcctgcggtgccagaaaccgttgaatccagcagaaaaacttagacaccttaatgaaaaacgacgatttcacaacatagctgggcactatagaggccagtgccattcgtgctgcaaccgagcacgacaggaacgactccaacgacgcagagaaacacaagtataatattaagtatgcatggacctaaggcaacattgcaagacattgtattgcatttagagccccaaaatgaaattccggttgaccttctatgtcacgagcaattaagcgactcagaggaagaaaacgatgaaatagatggagttaatcatcaacatttaccagcccgacgagccgaaccacaacgtcacacaatgttgtgtatgtgttgtaagtgtgaagccagaattgagctagtagtagaaagctcagcagacgaccttcgagcattccagcagctgtttctgaacaccctgtcctttgtgtgtccgtggtgtgcatcccagcagtaagcaacaatggctgatccagaaggtacagacggggagggcacgggttgtaacggctggttttatgtacaagctattgtagacaaaaaaacaggagatgtaatatcagatgacgaggacgaaaatgcaacagacacagggtcggatatggtagattttattgatacacaaggaacattttgtgaacaggcagagctagagacagcacaggcattgttccatgcgcaggaggtccacaatgatgcacaagtgttgcatgttttaaaacgaaagtttgcaggaggcagcacagaaaacagtccattaggggagcggctggaggtggatacagagttaagtccacggttacaagaaatatctttaaatagtgggcagaaaaaggcaaaaaggcggctgtttacaatatcagatagtggctatggctgttctgaagtggaagcaacacagattcaggtaactacaaatggcgaacatggcggcaatgtatgtagtggcggcagtacggaggctatagacaacgggggcacagagggcaacaacagcagtgtagacggtacaagtgacaatagcaatatagaaaatgtaaatccacaatgtaccatagcacaattaaaagacttgttaaaagtaaacaataaacaaggagctatgttagcagtatttaaagacacatatgggctatcatttacagatttagttagaaattttaaaagtgataaaaccacgtgtacagattgggttacagctatatttggagtaaacccaacaatagcagaaggatttaaaacactaatacagccatttatattatatgcccatattcaatgtctagactgtaaatggggagtattaatattagccctgttgcgttacaaatgtggtaagagtagactaacagttgctaaaggtttaagtacgttgttacacgtacctgaaacttgtatgttaattcaaccaccaaaattgcgaagtagtgttgcagcactatattggtatagaacaggaatatcaaatattagtgaagtaatgggagacacacctgagtggatacaaagacttactattatacaacatggaatagatgatagcaattttgatttgtcagaaatggtacaatgggcatttgataatgagctgacagatgaaagcgatatggcatttgaatatgccttattagcagacagcaacagcaatgcagctgcctttttaaaaagcaattgccaagctaaatatttaaaagattgtgccacaatgtgcaaacattataggcgagcccaaaaacgacaaatgaatatgtcacagtggatacgatttagatgttcaaaaatagatgaagggggagattggagaccaatagtgcaattcctgcgataccaacaaatagagtttataacatttttaggagccttaaaatcatttttaaaaggaacccccaaaaaaaattgtttagtattttgtggaccagcaaatacaggaaaatcatattttggaatgagttttatacactttatacaaggagcagtaatatcatttgtgaattccactagtcatttttggttggaaccgttaacagatactaaggtggccatgttagatgatgcaacgaccacgtgttggacatactttgatacctatatgagaaatgcgttagatggcaatccaataagtattgatagaaagcacaaaccattaatacaactaaaatgtcctccaatactactaaccacaaatatacatccagcaaaggataatagatggccatatttagaaagtagaataacagtatttgaatttccaaatgcatttccatttgataaaaatggcaatccagtatatgaaataaatgacaaaaattggaaatgtttttttgaaaggacatggtccagattagatttgcacgaggaagaggaagatgcagacaccgaaggaaaccctttcggaacgtttaagttgcgtgcaggacaaaatcatagaccactatgaaaatgacagtaaagacatagacagccaaatacagtattggcaactaatacgttgggaaaatgcaatattctttgcagcaagggaacatggcatacagacattaaaccaccaggtggtgccagcctataacatttcaaaaagtaaagcacataaagctattgaactgcaaatggccctacaaggccttgcacaaagtcgatacaaaaccgaggattggacactgcaagacacatgcgaggaactatggaatacagaacctactcactgctttaaaaaaggtggccaaacagtacaagtatattttgatggcaacaaagacaattgtatgacctatgtagcatgggacagtgtgtattatatgactgatgcaggaacatgggacaaaaccgctacctgtgtaagtcacaggggattgtattatgtaaaggaagggtacaacacgttttatatagaatttaaaagtgaatgtgaaaaatatgggaacacaggtacgtgggaagtacattttgggaataatgtaattgattgtaatgactctatgtgcagtaccagtgacgacacggtatccgctactcagcttgttaaacagctacagcacaccccctcaccgtattccagcaccgtgtccgtgggcaccgcaaagacctacggccagacgtcggctgctacacgacctggacactgtggactcgcggagaagcagcattgtggacctgtcaacccacttctcggtgcagctacacctacaggcaacaacaaaagacggaaactctgtagtggtaacactacgcctataatacatttaaaaggtgacagaaacagtttaaaatgtttacggtacagattgcgaaaacatagcgaccactatagagatatatcatccacctggcattggacaggtgcaggcaatgaaaaaacaggaatactgactgtaacataccatagtgaaacacaaagaacaaaatttttaaatactgttgcaattccagatagtgtacaaatattggtgggatacatgacaatgtaatacatatgctgtagtaccaatatgttatcacttatttttttattttgcttttgtgtatgcatgtatgtgtgctgccatgtcccgcttttgccatctgtctgtatgtgtgcgtatgcatgggtattggtatttgtgtatattgtggtaataacgtcccctgccacagcattcacagtatatgtattttgttttttattgcccatgttactattgcatatacatgctatattgtctttacagtaattgtataggttgttttatacagtgtattgtacattgtatattttgttttataccttttatgctttttgtatttttgtaataaaagtatggtatcccaccgtgccgcacgacgcaaacgggcttcggtaactgacttatataaaacatgtaaacaatctggtacatgtccacctgatgttgttcctaaggtggagggcaccacgttagcagataaaatattgcaatggtcaagccttggtatatttttgggtggacttggcataggtactggcagtggtacagggggtcgtacagggtacattccattgggtgggcgttccaatacagtggtggatgttggtcctacacgtcccccagtggttattgaacctgtgggccccacagacccatctattgttacattaatagaggactccagtgtggttacatcaggtgcacctaggcctacgtttactggcacgtctgggtttgatataacatctgcgggtacaactacacctgcggttttggatatcacaccttcgtctacctctgtgtctatttccacaaccaattttaccaatcctgcattttctgatccgtccattattgaagttccacaaactggggaggtggcaggtaatgtatttgttggtacccctacatctggaacacatgggtatgaggaaatacctttacaaacatttgcttcttctggtacgggggaggaacccattagtagtaccccattgcctactgtgcggcgtgtagcaggtccccgcctttacagtagggcctaccaacaagtgtcagtggctaaccctgagtttcttacacgtccatcctctttaattacatatgacaacccggcctttgagcctgtggacactacattaacatttgatcctcgtagtgatgttcctgattcagattttatggatattatccgtctacataggcctgctttaacatccaggcgtgggactgttcgctttagtagattaggtcaacgggcaactatgtttacccgcagcggtacacaaataggtgctagggttcacttttatcatgatataagtcctattgcaccttccccagaatatattgaactgcagcctttagtatctgccacggaggacaatgacttgtttgatatatatgcagatgacatggaccctgcagtgcctgtaccatcgcgttctactacctcctttgcattttttaaatattcgcccactatatcttctgcctcttcctatagtaatgtaacggtccctttaacctcctcttgggatgtgcctgtatacacgggtcctgatattacattaccatctactacctctgtatggcccattgtatcacccacggcccctgcctctacacagtatattggtatacatggtacacattattatttgtggccattatattattttattcctaagaaacgtaaacgtgttccctatttttttgcagatggctttgtggcggcctagtgacaataccgtatatcttccacctccttctgtggcaagagttgtaaataccgatgattatgtgactcccacaagcatattttatcatgctggcagctctagattattaactgttggtaatccatattttagggttcctgcaggtggtggcaataagcaggatattcctaaggtttctgcataccaatatagagtatttagggtgcagttacctgacccaaataaatttggtttacctgatactagtatttataatcctgaaacacaacgtttagtgtgggcctgtgctggagtggaaattggccgtggtcagcctttaggtgttggccttagtgggcatccattttataataaattagatgacactgaaagttcccatgccgccacgtctaatgtttctgaggacgttagggacaatgtgtctgtagattataagcagacacagttatgtattttgggctgtgcccctgctattggggaacactgggctaaaggcactgcttgtaaatcgcgtcctttatcacagggcgattgcccccctttagaacttaaaaacacagttttggaagatggtgatatggtagatactggatatggtgccatggactttagtacattgcaagatactaaatgtgaggtaccattggatatttgtcagtctatttgtaaatatcctgattatttacaaatgtctgcagatccttatggggattccatgtttttttgcttacggcgtgagcagctttttgctaggcatttttggaatagagcaggtactatgggtgacactgtgcctcaatccttatatattaaaggcacaggtatgcctgcttcacctggcagctgtgtgtattctccctctccaagtggctctattgttacctctgactcccagttgtttaataaaccatattggttacataaggcacagggtcataacaatggtgtttgctggcataatcaattatttgttactgtggtagataccactcccagtaccaatttaacaatatgtgcttctacacagtctcctgtacctgggcaatatgatgctaccaaatttaagcagtatagcagacatgttgaggaatatgatttgcagtttatttttcagttgtgtactattactttaactgcagatgttatgtcctatattcatagtatgaatagcagtattttagaggattggaactttggtgttcccccccccccaactactagtttggtggatacatatcgttttgtacaatctgttgctattacctgtcaaaaggatgctgcaccggctgaaaataaggatccctatgataagttaaagttttggaatgtggatttaaaggaaaagttttctttagacttagatcaatatccccttggacgtaaatttttggttcaggctggattgcgtcgcaagcccaccataggccctcgcaaacgttctgctccatctgccactacgtcttctaaacctgccaagcgtgtgcgtgtacgtgccaggaagtaatatgtgtgtgtgtatatatatatacatctattgttgtgtttgtatgtcctgtgtttgtgtttgttgtatgattgcattgtatggtatgtatggttgttgttgtatgttgtatgttactatatttgttggtatgtggcattaaataaaatatgttttgtggttctgtgtgttatgtggttgcgccctagtgagtaacaactgtatttgtgtttgtggtatgggtgttgcttgttgggctatatattgtcctgtatttcaagttataaaactgcacaccttacagcatccattttatcctacaatcctccattttgctgtgcaaccgatttcggttgcctttggcttatgtctgtggttttctgcacaatacagtacgctggcactattgcaaactttaatcttttgggcactgctcctacatattttgaacaattggcgcgcctctttggcgcatataaggcgcacctggtattagtcattttcctgtccaggtgcgctacaacaattgcttgcataactatatccactccctaagtaataaaactgcttttaggcacatattttagtttgtttttacttaagctaattgcatacttggcttgtacaactactttcatgtccaacattctgtctacccttaacatgaactataatatgactaagctgtgcatacatagtttatgcaaccgaaataggttgggcagcacatactatacttttc

SEQ ID NO: 620 - DNA, 7857 bp, Papilloma virus
attaatauttttaauaattgtagtatataaaaaagggagtaauugaaaauggtugggauugaaaauggtgtatataaaagatgtgagaaauauauuauaatautatggugugutttgaggatuuaauauggugauuutauaagutauutgatutgtguauggaautgaauauttuautguaagauatagaaataauutgtgtatattguaagauagtattggaauttauagaggtatttgaatttguatttaaagatttatttgtggtgtatagagauagtatauuuuatgutguatguuataaatgtatagatttttattutagaattagagaattaagauattattuagaututgtgtatggagauauattggaaaaautaautaauautgggttatauaatttattaataaggtguutguggtguuagaaauugttgaatuuaguagaaaaauttagauauuttaatgaaaaaugaugatttuauaauatagutggguautatagagguuagtguuattugtgutguaauugaguaugauaggaaugautuuaaugauguagagaaauauaagtataatattaagtatguatggauutaagguaauattguaagauattgtattguatttagaguuuuaaaatgaaattuuggttgauuttutatgtuaugaguaattaagugautuagaggaagaaaaugatgaaatagatggagttaatuatuaauatttauuaguuugaugaguugaauuauaaugtuauauaatgttgtgtatgtgttgtaagtgtgaaguuagaattgagutagtagtagaaagutuaguagaugauuttugaguattuuaguagutgtttutgaauauuutgtuutttgtgtgtuugtggtgtguatuuuaguagtaaguaauaatggutgatuuagaaggtauagauggggaggguaugggttgtaauggutggttttatgtauaagutattgtagauaaaaaaauaggagatgtaatatuagatgaugaggaugaaaatguaauagauauagggtuggatatggtagattttattgatauauaaggaauattttgtgaauagguagagutagagauaguauagguattgttuuatguguaggaggtuuauaatgatguauaagtgttguatgttttaaaaugaaagtttguaggagguaguauagaaaauagtuuattaggggaguggutggaggtggatauagagttaagtuuauggttauaagaaatatutttaaatagtggguagaaaaagguaaaaagguggutgtttauaatatuagatagtggutatggutgttutgaagtggaaguaauauagattuaggtaautauaaatggugaauatggugguaatgtatgtagtggugguagtauggaggutatagauaauggggguauagaggguaauaauaguagtgtagauggtauaagtgauaataguaatatagaaaatgtaaatuuauaatgtauuataguauaattaaaagauttgttaaaagtaaauaataaauaaggagutatgttaguagtatttaaagauauatatgggutatuatttauagatttagttagaaattttaaaagtgataaaauuaugtgtauagattgggttauagutatatttggagtaaauuuaauaataguagaaggatttaaaauautaatauaguuatttatattatatguuuatattuaatgtutagautgtaaatggggagtattaatattaguuutgttgugttauaaatgtggtaagagtagautaauagttgutaaaggtttaagtaugttgttauaugtauutgaaauttgtatgttaattuaauuauuaaaattgugaagtagtgttguaguautatattggtatagaauaggaatatuaaatattagtgaagtaatgggagauauauutgagtggatauaaagauttautattatauaauatggaatagatgataguaattttgatttgtuagaaatggtauaatggguatttgataatgagutgauagatgaaagugatatgguatttgaatatguuttattaguagauaguaauaguaatguagutguutttttaaaaaguaattguuaagutaaatatttaaaagattgtguuauaatgtguaaauattataggugaguuuaaaaaugauaaatgaatatgtuauagtggataugatttagatgttuaaaaatagatgaagggggagattggagauuaatagtguaattuutgugatauuaauaaatagagtttataauatttttaggaguuttaaaatuatttttaaaaggaauuuuuaaaaaaaattgtttagtattttgtggauuaguaaatauaggaaaatuatattttggaatgagttttatauautttatauaaggaguagtaatatuatttgtgaattuuautagtuatttttggttggaauugttaauagatautaaggtgguuatgttagatgatguaaugauuaugtgttggauatautttgatauutatatgagaaatgugttagatgguaatuuaataagtattgatagaaaguauaaauuattaatauaautaaaatgtuutuuaatautautaauuauaaatatauatuuaguaaaggataatagatgguuatatttagaaagtagaataauagtatttgaatttuuaaatguatttuuatttgataaaaatgguaatuuagtatatgaaataaatgauaaaaattggaaatgtttttttgaaaggauatggtuuagattagatttguaugaggaagaggaagatguagauauugaaggaaauuutttuggaaugtttaagttgugtguaggauaaaatuatagauuautatgaaaatgauagtaaagauatagauaguuaaatauagtattgguaautaataugttgggaaaatguaatattutttguaguaagggaauatgguatauagauattaaauuauuaggtggtguuaguutataauatttuaaaaagtaaaguauataaagutattgaautguaaatgguuutauaagguuttguauaaagtugatauaaaauugaggattggauautguaagauauatgugaggaautatggaatauagaauutautuautgutttaaaaaaggtgguuaaauagtauaagtatattttgatgguaauaaagauaattgtatgauutatgtaguatgggauagtgtgtattatatgautgatguaggaauatgggauaaaauugutauutgtgtaagtuauaggggattgtattatgtaaaggaagggtauaauaugttttatatagaatttaaaagtgaatgtgaaaaatatgggaauauaggtaugtgggaagtauattttgggaataatgtaattgattgtaatgaututatgtguagtauuagtgaugauauggtatuugutautuaguttgttaaauagutauaguauauuuuutuauugtattuuaguauugtgtuugtggguauuguaaagauutaugguuagaugtuggutgutauaugauutggauautgtggautuguggagaaguaguattgtggauutgtuaauuuauttutuggtguagutauauutauagguaauaauaaaagauggaaaututgtagtggtaauautauguutataatauatttaaaaggtgauagaaauagtttaaaatgtttauggtauagattgugaaaauatagugauuautatagagatatatuatuuauutgguattggauaggtguagguaatgaaaaaauaggaatautgautgtaauatauuatagtgaaauauaaagaauaaaatttttaaatautgttguaattuuagatagtgtauaaatattggtgggatauatgauaatgtaatauatatgutgtagtauuaatatgttatuauttatttttttattttguttttgtgtatguatgtatgtgtgutguuatgtuuuguttttguuatutgtutgtatgtgtgugtatguatgggtattggtatttgtgtatattgtggtaataaugtuuuutguuauaguattuauagtatatgtattttgttttttattguuuatgttautattguatatauatgutatattgtutttauagtaattgtataggttgttttatauagtgtattgtauattgtatattttgttttatauuttttatgutttttgtatttttgtaataaaagtatggtatuuuauugtguuguaugauguaaauggguttuggtaautgauttatataaaauatgtaaauaatutggtauatgtuuauutgatgttgttuutaaggtggaggguauuaugttaguagataaaatattguaatggtuaaguuttggtatatttttgggtggauttgguataggtautgguagtggtauagggggtugtauagggtauattuuattgggtgggugttuuaatauagtggtggatgttggtuutauaugtuuuuuagtggttattgaauutgtggguuuuauagauuuatutattgttauattaatagaggautuuagtgtggttauatuaggtguauutagguutaugtttautgguaugtutgggtttgatataauatutgugggtauaautauauutguggttttggatatuauauuttugtutauututgtgtutatttuuauaauuaattttauuaatuutguattttutgatuugtuuattattgaagttuuauaaautggggaggtgguaggtaatgtatttgttggtauuuutauatutggaauauatgggtatgaggaaatauutttauaaauatttguttuttutggtaugggggaggaauuuattagtagtauuuuattguutautgtguggugtgtaguaggtuuuuguutttauagtaggguutauuaauaagtgtuagtggutaauuutgagtttuttauaugtuuatuututttaattauatatgauaauuugguutttgaguutgtggauautauattaauatttgatuutugtagtgatgttuutgattuagattttatggatattatuugtutauatagguutgutttaauatuuaggugtgggautgttugutttagtagattaggtuaauggguaautatgtttauuuguaguggtauauaaataggtgutagggttuauttttatuatgatataagtuutattguauuttuuuuagaatatattgaautguaguutttagtatutguuauggaggauaatgauttgtttgatatatatguagatgauatggauuutguagtguutgtauuatugugttutautauutuutttguattttttaaatattuguuuautatatuttutguututtuutatagtaatgtaauggtuuutttaauutuututtgggatgtguutgtatauaugggtuutgatattauattauuatutautauututgtatgguuuattgtatuauuuaugguuuutguututauauagtatattggtatauatggtauauattattatttgtgguuattatattattttattuutaagaaaugtaaaugtgttuuutatttttttguagatggutttgtggugguutagtgauaatauugtatatuttuuauutuuttutgtgguaagagttgtaaatauugatgattatgtgautuuuauaaguatattttatuatgutgguagututagattattaautgttggtaatuuatattttagggttuutguaggtggtgguaataaguaggatattuutaaggtttutguatauuaatatagagtatttagggtguagttauutgauuuaaataaatttggtttauutgatautagtatttataatuutgaaauauaaugtttagtgtggguutgtgutggagtggaaattgguugtggtuaguutttaggtgttgguuttagtggguatuuattttataataaattagatgauautgaaagttuuuatguuguuaugtutaatgtttutgaggaugttagggauaatgtgtutgtagattataaguagauauagttatgtattttgggutgtguuuutgutattggggaauautgggutaaagguautguttgtaaatugugtuutttatuauagggugattguuuuuutttagaauttaaaaauauagttttggaagatggtgatatggtagatautggatatggtguuatggautttagtauattguaagatautaaatgtgaggtauuattggatatttgtuagtutatttgtaaatatuutgattatttauaaatgtutguagatuuttatggggattuuatgtttttttguttauggugtgaguagutttttgutagguatttttggaatagaguaggtautatgggtgauautgtguutuaatuuttatatattaaagguauaggtatguutguttuauutgguagutgtgtgtattutuuututuuaagtggututattgttauututgautuuuagttgtttaataaauuatattggttauataagguauagggtuataauaatggtgtttgutgguataatuaattatttgttautgtggtagatauuautuuuagtauuaatttaauaatatgtguttutauauagtutuutgtauutggguaatatgatgutauuaaatttaaguagtataguagauatgttgaggaatatgatttguagtttatttttuagttgtgtautattautttaautguagatgttatgtuutatattuatagtatgaataguagtattttagaggattggaautttggtgttuuuuuuuuuuuaautautagtttggtggatauatatugttttgtauaatutgttgutattauutgtuaaaaggatgutguauuggutgaaaataaggatuuutatgataagttaaagttttggaatgtggatttaaaggaaaagttttutttagauttagatuaatatuuuuttggaugtaaatttttggttuaggutggattgugtuguaaguuuauuatagguuutuguaaaugttutgutuuatutguuautaugtuttutaaauutguuaagugtgtgugtgtaugtguuaggaagtaatatgtgtgtgtgtatatatatatauatutattgttgtgtttgtatgtuutgtgtttgtgtttgttgtatgattguattgtatggtatgtatggttgttgttgtatgttgtatgttautatatttgttggtatgtgguattaaataaaatatgttttgtggttutgtgtgttatgtggttguguuutagtgagtaauaautgtatttgtgtttgtggtatgggtgttguttgttgggutatatattgtuutgtatttuaagttataaaautguauauuttauaguatuuattttatuutauaatuutuuattttgutgtguaauugatttuggttguutttgguttatgtutgtggttttutguauaatauagtaugutgguautattguaaautttaatuttttggguautgutuutauatattttgaauaattgguguguututttgguguatataagguguauutggtattagtuattttuutgtuuaggtgugutauaauaattguttguataautatatuuautuuutaagtaataaaautguttttagguauatattttagtttgtttttauttaagutaattguatauttgguttgtauaautautttuatgtuuaauattutgtutauuuttaauatgaautataatatgautaagutgtguatauatagtttatguaauugaaataggttggguaguauatautatauttttu

SEQ ID NO: 621 - DNA, 7857 bp, Papilloma virus
attaatatttttaataattgtagtatataaaaaagggagtaattgaaaatggttgggattgaaaatggtgtatataaaagatgtgagaaatatattataatattatggtgtgttttgaggatttaatatggtgattttataagttatttgatttgtgtatggaattgaatattttattgtaagatatagaaataatttgtgtatattgtaagatagtattggaatttatagaggtatttgaatttgtatttaaagatttatttgtggtgtatagagatagtatattttatgttgtatgttataaatgtatagatttttattttagaattagagaattaagatattatttagattttgtgtatggagatatattggaaaaattaattaatattgggttatataatttattaataaggtgtttgtggtgttagaaattgttgaatttagtagaaaaatttagatattttaatgaaaaatgatgattttataatatagttgggtattatagaggttagtgttatttgtgttgtaattgagtatgataggaatgattttaatgatgtagagaaatataagtataatattaagtatgtatggatttaaggtaatattgtaagatattgtattgtatttagagttttaaaatgaaattttggttgattttttatgttatgagtaattaagtgatttagaggaagaaaatgatgaaatagatggagttaattattaatatttattagtttgatgagttgaattataatgttatataatgttgtgtatgtgttgtaagtgtgaagttagaattgagttagtagtagaaagtttagtagatgatttttgagtattttagtagttgtttttgaatattttgttttttgtgtgtttgtggtgtgtattttagtagtaagtaataatggttgatttagaaggtatagatggggagggtatgggttgtaatggttggttttatgtataagttattgtagataaaaaaataggagatgtaatattagatgatgaggatgaaaatgtaatagatatagggttggatatggtagattttattgatatataaggaatattttgtgaataggtagagttagagatagtataggtattgttttatgtgtaggaggtttataatgatgtataagtgttgtatgttttaaaatgaaagtttgtaggaggtagtatagaaaatagtttattaggggagtggttggaggtggatatagagttaagtttatggttataagaaatatttttaaatagtgggtagaaaaaggtaaaaaggtggttgtttataatattagatagtggttatggttgttttgaagtggaagtaatatagatttaggtaattataaatggtgaatatggtggtaatgtatgtagtggtggtagtatggaggttatagataatgggggtatagagggtaataatagtagtgtagatggtataagtgataatagtaatatagaaaatgtaaatttataatgtattatagtataattaaaagatttgttaaaagtaaataataaataaggagttatgttagtagtatttaaagatatatatgggttattatttatagatttagttagaaattttaaaagtgataaaattatgtgtatagattgggttatagttatatttggagtaaatttaataatagtagaaggatttaaaatattaatatagttatttatattatatgtttatatttaatgtttagattgtaaatggggagtattaatattagttttgttgtgttataaatgtggtaagagtagattaatagttgttaaaggtttaagtatgttgttatatgtatttgaaatttgtatgttaatttaattattaaaattgtgaagtagtgttgtagtattatattggtatagaataggaatattaaatattagtgaagtaatgggagatatatttgagtggatataaagatttattattatataatatggaatagatgatagtaattttgatttgttagaaatggtataatgggtatttgataatgagttgatagatgaaagtgatatggtatttgaatatgttttattagtagatagtaatagtaatgtagttgtttttttaaaaagtaattgttaagttaaatatttaaaagattgtgttataatgtgtaaatattataggtgagtttaaaaatgataaatgaatatgttatagtggatatgatttagatgtttaaaaatagatgaagggggagattggagattaatagtgtaatttttgtgatattaataaatagagtttataatatttttaggagttttaaaattatttttaaaaggaatttttaaaaaaaattgtttagtattttgtggattagtaaatataggaaaattatattttggaatgagttttatatattttatataaggagtagtaatattatttgtgaattttattagttatttttggttggaattgttaatagatattaaggtggttatgttagatgatgtaatgattatgtgttggatatattttgatatttatatgagaaatgtgttagatggtaatttaataagtattgatagaaagtataaattattaatataattaaaatgttttttaatattattaattataaatatatatttagtaaaggataatagatggttatatttagaaagtagaataatagtatttgaatttttaaatgtatttttatttgataaaaatggtaatttagtatatgaaataaatgataaaaattggaaatgtttttttgaaaggatatggtttagattagatttgtatgaggaagaggaagatgtagatattgaaggaaatttttttggaatgtttaagttgtgtgtaggataaaattatagattattatgaaaatgatagtaaagatatagatagttaaatatagtattggtaattaatatgttgggaaaatgtaatattttttgtagtaagggaatatggtatatagatattaaattattaggtggtgttagtttataatattttaaaaagtaaagtatataaagttattgaattgtaaatggttttataaggttttgtataaagttgatataaaattgaggattggatattgtaagatatatgtgaggaattatggaatatagaatttatttattgttttaaaaaaggtggttaaatagtataagtatattttgatggtaataaagataattgtatgatttatgtagtatgggatagtgtgtattatatgattgatgtaggaatatgggataaaattgttatttgtgtaagttataggggattgtattatgtaaaggaagggtataatatgttttatatagaatttaaaagtgaatgtgaaaaatatgggaatataggtatgtgggaagtatattttgggaataatgtaattgattgtaatgattttatgtgtagtattagtgatgatatggtatttgttatttagtttgttaaatagttatagtatatttttttattgtattttagtattgtgtttgtgggtattgtaaagatttatggttagatgttggttgttatatgatttggatattgtggatttgtggagaagtagtattgtggatttgttaatttattttttggtgtagttatatttataggtaataataaaagatggaaattttgtagtggtaatattatgtttataatatatttaaaaggtgatagaaatagtttaaaatgtttatggtatagattgtgaaaatatagtgattattatagagatatattatttatttggtattggataggtgtaggtaatgaaaaaataggaatattgattgtaatatattatagtgaaatataaagaataaaatttttaaatattgttgtaattttagatagtgtataaatattggtgggatatatgataatgtaatatatatgttgtagtattaatatgttattatttatttttttattttgtttttgtgtatgtatgtatgtgtgttgttatgttttgtttttgttatttgtttgtatgtgtgtgtatgtatgggtattggtatttgtgtatattgtggtaataatgttttttgttatagtatttatagtatatgtattttgttttttattgtttatgttattattgtatatatatgttatattgtttttatagtaattgtataggttgttttatatagtgtattgtatattgtatattttgttttatattttttatgttttttgtatttttgtaataaaagtatggtattttattgtgttgtatgatgtaaatgggttttggtaattgatttatataaaatatgtaaataatttggtatatgtttatttgatgttgtttttaaggtggagggtattatgttagtagataaaatattgtaatggttaagttttggtatatttttgggtggatttggtataggtattggtagtggtatagggggttgtatagggtatattttattgggtgggtgttttaatatagtggtggatgttggttttatatgttttttagtggttattgaatttgtgggttttatagatttatttattgttatattaatagaggattttagtgtggttatattaggtgtatttaggtttatgtttattggtatgtttgggtttgatataatatttgtgggtataattatatttgtggttttggatattatatttttgtttatttttgtgtttatttttataattaattttattaattttgtattttttgatttgtttattattgaagttttataaattggggaggtggtaggtaatgtatttgttggtatttttatatttggaatatatgggtatgaggaaatatttttataaatatttgttttttttggtatgggggaggaatttattagtagtattttattgtttattgtgtggtgtgtagtaggtttttgtttttatagtagggtttattaataagtgttagtggttaattttgagttttttatatgtttattttttttaattatatatgataatttggtttttgagtttgtggatattatattaatatttgatttttgtagtgatgtttttgatttagattttatggatattatttgtttatataggtttgttttaatatttaggtgtgggattgtttgttttagtagattaggttaatgggtaattatgtttatttgtagtggtatataaataggtgttagggtttatttttattatgatataagttttattgtattttttttagaatatattgaattgtagtttttagtatttgttatggaggataatgatttgtttgatatatatgtagatgatatggattttgtagtgtttgtattattgtgttttattattttttttgtattttttaaatatttgtttattatattttttgtttttttttatagtaatgtaatggtttttttaatttttttttgggatgtgtttgtatatatgggttttgatattatattattatttattatttttgtatggtttattgtattatttatggtttttgtttttatatagtatattggtatatatggtatatattattatttgtggttattatattattttatttttaagaaatgtaaatgtgttttttatttttttgtagatggttttgtggtggtttagtgataatattgtatattttttatttttttttgtggtaagagttgtaaatattgatgattatgtgatttttataagtatattttattatgttggtagttttagattattaattgttggtaatttatattttagggtttttgtaggtggtggtaataagtaggatatttttaaggtttttgtatattaatatagagtatttagggtgtagttatttgatttaaataaatttggtttatttgatattagtatttataattttgaaatataatgtttagtgtgggtttgtgttggagtggaaattggttgtggttagtttttaggtgttggttttagtgggtatttattttataataaattagatgatattgaaagtttttatgttgttatgtttaatgtttttgaggatgttagggataatgtgtttgtagattataagtagatatagttatgtattttgggttgtgtttttgttattggggaatattgggttaaaggtattgtttgtaaattgtgttttttattatagggtgattgtttttttttagaatttaaaaatatagttttggaagatggtgatatggtagatattggatatggtgttatggattttagtatattgtaagatattaaatgtgaggtattattggatatttgttagtttatttgtaaatattttgattatttataaatgtttgtagatttttatggggattttatgtttttttgtttatggtgtgagtagttttttgttaggtatttttggaatagagtaggtattatgggtgatattgtgttttaatttttatatattaaaggtataggtatgtttgttttatttggtagttgtgtgtattttttttttttaagtggttttattgttatttttgatttttagttgtttaataaattatattggttatataaggtatagggttataataatggtgtttgttggtataattaattatttgttattgtggtagatattatttttagtattaatttaataatatgtgtttttatatagttttttgtatttgggtaatatgatgttattaaatttaagtagtatagtagatatgttgaggaatatgatttgtagtttattttttagttgtgtattattattttaattgtagatgttatgttttatatttatagtatgaatagtagtattttagaggattggaattttggtgtttttttttttttaattattagtttggtggatatatattgttttgtataatttgttgttattatttgttaaaaggatgttgtattggttgaaaataaggatttttatgataagttaaagttttggaatgtggatttaaaggaaaagttttttttagatttagattaatatttttttggatgtaaatttttggtttaggttggattgtgttgtaagtttattataggtttttgtaaatgttttgttttatttgttattatgttttttaaatttgttaagtgtgtgtgtgtatgtgttaggaagtaatatgtgtgtgtgtatatatatatatatttattgttgtgtttgtatgttttgtgtttgtgtttgttgtatgattgtattgtatggtatgtatggttgttgttgtatgttgtatgttattatatttgttggtatgtggtattaaataaaatatgttttgtggttttgtgtgttatgtggttgtgttttagtgagtaataattgtatttgtgtttgtggtatgggtgttgtttgttgggttatatattgttttgtattttaagttataaaattgtatattttatagtatttattttattttataattttttattttgttgtgtaattgattttggttgtttttggtttatgtttgtggttttttgtataatatagtatgttggtattattgtaaattttaattttttgggtattgtttttatatattttgaataattggtgtgtttttttggtgtatataaggtgtatttggtattagttatttttttgtttaggtgtgttataataattgtttgtataattatatttattttttaagtaataaaattgtttttaggtatatattttagtttgtttttatttaagttaattgtatatttggtttgtataattatttttatgtttaatattttgtttatttttaatatgaattataatatgattaagttgtgtatatatagtttatgtaattgaaataggttgggtagtatatattatatttttt

SEQ ID NO: 622 - DNA, 7857 bp, Papilloma virus
taattatgaaaattgttaacatcatatattttttccctcattggcttttgccagccctggcttttgccacatatattttctacactctttgtgtggtgttatgataccgcgcgaaactcctaggttgtgccgctgggatgttcgatggactagacacgtgccttgacttgtgaagtgacgttctgtatctttattggacacatataacgttctgtcataaccttgaatgtctccataaacttaaacgtaaatttctaaataaacaccacatatctctgtcatatggggtacgacgtacggtatttacatatctaaaaataagatcttaatctcttaattctgtaataagtctgagacacatacctctgtgtaacctttttgattgattgtgacccaatatgttaaataattattccacggacgccacggtctttggcaacttaggtcgtctttttgaatctgtggaattactttttgctgctaaagtgttgtatcgacccgtgatatctccggtcacggtaagcacgacgttggctcgtgctgtccttgctgaggttgctgcgtctctttgtgttcatattataattcatacgtacctggattccgttgtaacgttctgtaacataacgtaaatctcggggttttactttaaggccaactggaagatacagtgctcgttaattcgctgagtctccttcttttgctactttatctacctcaattagtagttgtaaatggtcgggctgctcggcttggtgttgcagtgtgttacaacacatacacaacattcacacttcggtcttaactcgatcatcatctttcgagtcgtctgctggaagctcgtaaggtcgtcgacaaagacttgtgggacaggaaacacacaggcaccacacgtagggtcgtcattcgttgttaccgactaggtcttccatgtctgcccctcccgtgcccaacattgccgaccaaaatacatgttcgataacatctgtttttttgtcctctacattatagtctactgctcctgcttttacgttgtctgtgtcccagcctataccatctaaaataactatgtgttccttgtaaaacacttgtccgtctcgatctctgtcgtgtccgtaacaaggtacgcgtcctccaggtgttactacgtgttcacaacgtacaaaattttgctttcaaacgtcctccgtcgtgtcttttgtcaggtaatcccctcgccgacctccacctatgtctcaattcaggtgccaatgttctttatagaaatttatcacccgtctttttccgtttttccgccgacaaatgttatagtctatcaccgataccgacaagacttcaccttcgttgtgtctaagtccattgatgtttaccgcttgtaccgccgttacatacatcaccgccgtcatgcctccgatatctgttgcccccgtgtctcccgttgttgtcgtcacatctgccatgttcactgttatcgttatatcttttacatttaggtgttacatggtatcgtgttaattttctgaacaattttcatttgttatttgttcctcgatacaatcgtcataaatttctgtgtatacccgatagtaaatgtctaaatcaatctttaaaattttcactattttggtgcacatgtctaacccaatgtcgatataaacctcatttgggttgttatcgtcttcctaaattttgtgattatgtcggtaaatataatatacgggtataagttacagatctgacatttacccctcataattataatcgggacaacgcaatgtttacaccattctcatctgattgtcaacgatttccaaattcatgcaacaatgtgcatggactttgaacatacaattaagttggtggttttaacgcttcatcacaacgtcgtgatataaccatatcttgtccttatagtttataatcacttcattaccctctgtgtggactcacctatgtttctgaatgataatatgttgtaccttatctactatcgttaaaactaaacagtctttaccatgttacccgtaaactattactcgactgtctactttcgctataccgtaaacttatacggaataatcgtctgtcgttgtcgttacgtcgacggaaaaatttttcgttaacggttcgatttataaattttctaacacggtgttacacgtttgtaatatccgctcgggtttttgctgtttacttatacagtgtcacctatgctaaatctacaagtttttatctacttccccctctaacctctggttatcacgttaaggacgctatggttgtttatctcaaatattgtaaaaatcctcggaattttagtaaaaattttccttgggggttttttttaacaaatcataaaacacctggtcgtttatgtccttttagtataaaaccttactcaaaatatgtgaaatatgttcctcgtcattatagtaaacacttaaggtgatcagtaaaaaccaaccttggcaattgtctatgattccaccggtacaatctactacgttgctggtgcacaacctgtatgaaactatggatatactctttacgcaatctaccgttaggttattcataactatctttcgtgtttggtaattatgttgattttacaggaggttatgatgattggtgtttatatgtaggtcgtttcctattatctaccggtataaatctttcatcttattgtcataaacttaaaggtttacgtaaaggtaaactatttttaccgttaggtcatatactttatttactgtttttaacctttacaaaaaaactttcctgtaccaggtctaatctaaacgtgctccttctccttctacgtctgtggcttcctttgggaaagccttgcaaattcaacgcacgtcctgttttagtatctggtgatacttttactgtcatttctgtatctgtcggtttatgtcataaccgttgattatgcaacccttttacgttataagaaacgtcgttcccttgtaccgtatgtctgtaatttggtggtccaccacggtcggatattgtaaagtttttcatttcgtgtatttcgataacttgacgtttaccgggatgttccggaacgtgtttcagctatgttttggctcctaacctgtgacgttctgtgtacgctccttgataccttatgtcttggatgagtgacgaaattttttccaccggtttgtcatgttcatataaaactaccgttgtttctgttaacatactggatacatcgtaccctgtcacacataatatactgactacgtccttgtaccctgttttggcgatggacacattcagtgtcccctaacataatacatttccttcccatgttgtgcaaaatatatcttaaattttcacttacactttttatacccttgtgtccatgcacccttcatgtaaaacccttattacattaactaacattactgagatacacgtcatggtcactgctgtgccataggcgatgagtcgaacaatttgtcgatgtcgtgtgggggagtggcataaggtcgtggcacaggcacccgtggcgtttctggatgccggtctgcagccgacgatgtgctggacctgtgacacctgagcgcctcttcgtcgtaacacctggacagttgggtgaagagccacgtcgatgtggatgtccgttgttgttttctgcctttgagacatcaccattgtgatgcggatattatgtaaattttccactgtctttgtcaaattttacaaatgccatgtctaacgcttttgtatcgctggtgatatctctatatagtaggtggaccgtaacctgtccacgtccgttacttttttgtccttatgactgacattgtatggtatcactttgtgtttcttgttttaaaaatttatgacaacgttaaggtctatcacatgtttataaccaccctatgtactgttacattatgtatacgacatcatggttatacaatagtgaataaaaaaataaaacgaaaacacatacgtacatacacacgacggtacagggcgaaaacggtagacagacatacacacgcatacgtacccataaccataaacacatataacaccattattgcaggggacggtgtcgtaagtgtcatatacataaaacaaaaaataacgggtacaatgataacgtatatgtacgatataacagaaatgtcattaacatatccaacaaaatatgtcacataacatgtaacatataaaacaaaatatggaaaatacgaaaaacataaaaacattattttcataccatagggtggcacggcgtgctgcgtttgcccgaagccattgactgaatatattttgtacatttgttagaccatgtacaggtggactacaacaaggattccacctcccgtggtgcaatcgtctattttataacgttaccagttcggaaccatataaaaacccacctgaaccgtatccatgaccgtcaccatgtcccccagcatgtcccatgtaaggtaacccacccgcaaggttatgtcaccacctacaaccaggatgtgcagggggtcaccaataacttggacacccggggtgtctgggtagataacaatgtaattatctcctgaggtcacaccaatgtagtccacgtggatccggatgcaaatgaccgtgcagacccaaactatattgtagacgcccatgttgatgtggacgccaaaacctatagtgtggaagcagatggagacacagataaaggtgttggttaaaatggttaggacgtaaaagactaggcaggtaataacttcaaggtgtttgacccctccaccgtccattacataaacaaccatggggatgtagaccttgtgtacccatactcctttatggaaatgtttgtaaacgaagaagaccatgccccctccttgggtaatcatcatggggtaacggatgacacgccgcacatcgtccaggggcggaaatgtcatcccggatggttgttcacagtcaccgattgggactcaaagaatgtgcaggtaggagaaattaatgtatactgttgggccggaaactcggacacctgtgatgtaattgtaaactaggagcatcactacaaggactaagtctaaaatacctataataggcagatgtatccggacgaaattgtaggtccgcaccctgacaagcgaaatcatctaatccagttgcccgttgatacaaatgggcgtcgccatgtgtttatccacgatcccaagtgaaaatagtactatattcaggataacgtggaaggggtcttatataacttgacgtcggaaatcatagacggtgcctcctgttactgaacaaactatatatacgtctactgtacctgggacgtcacggacatggtagcgcaagatgatggaggaaacgtaaaaaatttataagcgggtgatatagaagacggagaaggatatcattacattgccagggaaattggaggagaaccctacacggacatatgtgcccaggactataatgtaatggtagatgatggagacataccgggtaacatagtgggtgccggggacggagatgtgtcatataaccatatgtaccatgtgtaataataaacaccggtaatataataaaataaggattctttgcatttgcacaagggataaaaaaacgtctaccgaaacaccgccggatcactgttatggcatatagaaggtggaggaagacaccgttctcaacatttatggctactaatacactgagggtgttcgtataaaatagtacgaccgtcgagatctaataattgacaaccattaggtataaaatcccaaggacgtccaccaccgttattcgtcctataaggattccaaagacgtatggttatatctcataaatcccacgtcaatggactgggtttatttaaaccaaatggactatgatcataaatattaggactttgtgttgcaaatcacacccggacacgacctcacctttaaccggcaccagtcggaaatccacaaccggaatcacccgtaggtaaaatattatttaatctactgtgactttcaagggtacggcggtgcagattacaaagactcctgcaatccctgttacacagacatctaatattcgtctgtgtcaatacataaaacccgacacggggacgataaccccttgtgacccgatttccgtgacgaacatttagcgcaggaaatagtgtcccgctaacggggggaaatcttgaatttttgtgtcaaaaccttctaccactataccatctatgacctataccacggtacctgaaatcatgtaacgttctatgatttacactccatggtaacctataaacagtcagataaacatttataggactaataaatgtttacagacgtctaggaatacccctaaggtacaaaaaaacgaatgccgcactcgtcgaaaaacgatccgtaaaaaccttatctcgtccatgatacccactgtgacacggagttaggaatatataatttccgtgtccatacggacgaagtggaccgtcgacacacataagagggagaggttcaccgagataacaatggagactgagggtcaacaaattatttggtataaccaatgtattccgtgtcccagtattgttaccacaaacgaccgtattagttaataaacaatgacaccatctatggtgagggtcatggttaaattgttatacacgaagatgtgtcagaggacatggacccgttatactacgatggtttaaattcgtcatatcgtctgtacaactccttatactaaacgtcaaataaaaagtcaacacatgataatgaaattgacgtctacaatacaggatataagtatcatacttatcgtcataaaatctcctaaccttgaaaccacaagggggggggggttgatgatcaaaccacctatgtatagcaaaacatgttagacaacgataatggacagttttcctacgacgtggccgacttttattcctagggatactattcaatttcaaaaccttacacctaaatttccttttcaaaagaaatctgaatctagttataggggaacctgcatttaaaaaccaagtccgacctaacgcagcgttcgggtggtatccgggagcgtttgcaagacgaggtagacggtgatgcagaagatttggacggttcgcacacgcacatgcacggtccttcattatacacacacacatatatatatatgtagataacaacacaaacatacaggacacaaacacaaacaacatactaacgtaacataccatacataccaacaacaacatacaacatacaatgatataaacaaccatacaccgtaatttattttatacaaaacaccaagacacacaatacaccaacgcgggatcactcattgttgacataaacacaaacaccatacccacaacgaacaacccgatatataacaggacataaagttcaatattttgacgtgtggaatgtcgtaggtaaaataggatgttaggaggtaaaacgacacgttggctaaagccaacggaaaccgaatacagacaccaaaagacgtgttatgtcatgcgaccgtgataacgtttgaaattagaaaacccgtgacgaggatgtataaaacttgttaaccgcgcggagaaaccgcgtatattccgcgtggaccataatcagtaaaaggacaggtccacgcgatgttgttaacgaacgtattgatataggtgagggattcattattttgacgaaaatccgtgtataaaatcaaacaaaaatgaattcgattaacgtatgaaccgaacatgttgatgaaagtacaggttgtaagacagatgggaattgtacttgatattatactgattcgacacgtatgtatcaaatacgttggctttatccaacccgtcgtgtatgatatgaaaag

SEQ ID NO: 623 - DNA, 7857 bp, Papilloma virus
taattatgaaaattgttaauatuatatattttttuuutuattgguttttguuaguuutgguttttguuauatatattttutauaututttgtgtggtgttatgatauugugugaaautuutaggttgtguugutgggatgttugatggautagauaugtguuttgauttgtgaagtgaugttutgtatutttattggauauatataaugttutgtuataauuttgaatgtutuuataaauttaaaugtaaatttutaaataaauauuauatatututgtuatatggggtaugaugtauggtatttauatatutaaaaataagatuttaatututtaattutgtaataagtutgagauauatauututgtgtaauutttttgattgattgtgauuuaatatgttaaataattattuuauggauguuauggtutttgguaauttaggtugtutttttgaatutgtggaattautttttgutgutaaagtgttgtatugauuugtgatatutuuggtuauggtaaguaugaugttggutugtgutgtuuttgutgaggttgutgugtututttgtgttuatattataattuataugtauutggattuugttgtaaugttutgtaauataaugtaaatutuggggttttautttaagguuaautggaagatauagtgutugttaattugutgagtutuuttuttttgutautttatutauutuaattagtagttgtaaatggtugggutgutugguttggtgttguagtgtgttauaauauatauauaauattuauauttuggtuttaautugatuatuatutttugagtugtutgutggaagutugtaaggtugtugauaaagauttgtgggauaggaaauauauagguauuauaugtagggtugtuattugttgttauugautaggtuttuuatgtutguuuutuuugtguuuaauattguugauuaaaatauatgttugataauatutgtttttttgtuututauattatagtutautgutuutguttttaugttgtutgtgtuuuaguutatauuatutaaaataautatgtgttuuttgtaaaauauttgtuugtutugatututgtugtgtuugtaauaaggtaugugtuutuuaggtgttautaugtgttuauaaugtauaaaattttgutttuaaaugtuutuugtugtgtuttttgtuaggtaatuuuutuguugauutuuauutatgtutuaattuaggtguuaatgttutttatagaaatttatuauuugtutttttuugtttttuuguugauaaatgttatagtutatuauugatauugauaagauttuauuttugttgtgtutaagtuuattgatgtttauuguttgtauuguugttauatauatuauuguugtuatguutuugatatutgttguuuuugtgtutuuugttgttgtugtuauatutguuatgttuautgttatugttatatuttttauatttaggtgttauatggtatugtgttaattttutgaauaattttuatttgttatttgttuutugatauaatugtuataaatttutgtgtatauuugatagtaaatgtutaaatuaatutttaaaattttuautattttggtguauatgtutaauuuaatgtugatataaauutuatttgggttgttatugtuttuutaaattttgtgattatgtuggtaaatataatataugggtataagttauagatutgauatttauuuutuataattataatugggauaauguaatgtttauauuattutuatutgattgtuaaugatttuuaaattuatguaauaatgtguatggautttgaauatauaattaagttggtggttttaauguttuatuauaaugtugtgatataauuatatuttgtuuttatagtttataatuauttuattauuututgtgtggautuauutatgtttutgaatgataatatgttgtauuttatutautatugttaaaautaaauagtutttauuatgttauuugtaaautattautugautgtutautttugutatauugtaaauttatauggaataatugtutgtugttgtugttaugtugauggaaaaatttttugttaauggttugatttataaattttutaauauggtgttauaugtttgtaatatuugutugggtttttgutgtttauttatauagtgtuauutatgutaaatutauaagtttttatutauttuuuuututaauututggttatuaugttaaggaugutatggttgtttatutuaaatattgtaaaaatuutuggaattttagtaaaaattttuuttgggggttttttttaauaaatuataaaauauutggtugtttatgtuuttttagtataaaauuttautuaaaatatgtgaaatatgttuutugtuattatagtaaauauttaaggtgatuagtaaaaauuaauuttgguaattgtutatgattuuauuggtauaatutautaugttgutggtguauaauutgtatgaaautatggatataututttauguaatutauugttaggttattuataautatutttugtgtttggtaattatgttgattttauaggaggttatgatgattggtgtttatatgtaggtugtttuutattatutauuggtataaatutttuatuttattgtuataaauttaaaggtttaugtaaaggtaaautatttttauugttaggtuatatautttatttautgtttttaauutttauaaaaaaautttuutgtauuaggtutaatutaaaugtgutuuttutuuttutaugtutgtgguttuutttgggaaaguuttguaaattuaauguaugtuutgttttagtatutggtgatauttttautgtuatttutgtatutgtuggtttatgtuataauugttgattatguaauuuttttaugttataagaaaugtugttuuuttgtauugtatgtutgtaatttggtggtuuauuauggtuggatattgtaaagtttttuatttugtgtatttugataauttgaugtttauugggatgttuuggaaugtgtttuagutatgttttggutuutaauutgtgaugttutgtgtaugutuuttgatauuttatgtuttggatgagtgaugaaattttttuuauuggtttgtuatgttuatataaaautauugttgtttutgttaauatautggatauatugtauuutgtuauauataatatautgautaugtuuttgtauuutgttttggugatggauauattuagtgtuuuutaauataatauatttuuttuuuatgttgtguaaaatatatuttaaattttuauttauautttttatauuuttgtgtuuatguauuuttuatgtaaaauuuttattauattaautaauattautgagatauaugtuatggtuautgutgtguuataggugatgagtugaauaatttgtugatgtugtgtgggggagtgguataaggtugtgguauagguauuugtggugtttutggatguuggtutguaguugaugatgtgutggauutgtgauauutgaguguututtugtugtaauauutggauagttgggtgaagaguuaugtugatgtggatgtuugttgttgttttutguutttgagauatuauuattgtgatguggatattatgtaaattttuuautgtutttgtuaaattttauaaatguuatgtutaauguttttgtatugutggtgatatututatatagtaggtggauugtaauutgtuuaugtuugttauttttttgtuuttatgautgauattgtatggtatuautttgtgtttuttgttttaaaaatttatgauaaugttaaggtutatuauatgtttataauuauuutatgtautgttauattatgtataugauatuatggttatauaatagtgaataaaaaaataaaaugaaaauauataugtauatauauaugauggtauagggugaaaauggtagauagauatauauauguataugtauuuataauuataaauauatataauauuattattguaggggauggtgtugtaagtgtuatatauataaaauaaaaaataaugggtauaatgataaugtatatgtaugatataauagaaatgtuattaauatatuuaauaaaatatgtuauataauatgtaauatataaaauaaaatatggaaaataugaaaaauataaaaauattattttuatauuatagggtgguauggugtgutgugtttguuugaaguuattgautgaatatattttgtauatttgttagauuatgtauaggtggautauaauaaggattuuauutuuugtggtguaatugtutattttataaugttauuagttuggaauuatataaaaauuuauutgaauugtatuuatgauugtuauuatgtuuuuuaguatgtuuuatgtaaggtaauuuauuuguaaggttatgtuauuauutauaauuaggatgtguagggggtuauuaataauttggauauuuggggtgtutgggtagataauaatgtaattatutuutgaggtuauauuaatgtagtuuaugtggatuuggatguaaatgauugtguagauuuaaautatattgtagauguuuatgttgatgtggauguuaaaauutatagtgtggaaguagatggagauauagataaaggtgttggttaaaatggttaggaugtaaaagautagguaggtaataauttuaaggtgtttgauuuutuuauugtuuattauataaauaauuatggggatgtagauuttgtgtauuuatautuutttatggaaatgtttgtaaaugaagaagauuatguuuuutuuttgggtaatuatuatggggtaauggatgauauguuguauatugtuuagggguggaaatgtuatuuuggatggttgttuauagtuauugattgggautuaaagaatgtguaggtaggagaaattaatgtatautgttggguuggaaautuggauauutgtgatgtaattgtaaautaggaguatuautauaaggautaagtutaaaatauutataatagguagatgtatuuggaugaaattgtaggtuuguauuutgauaagugaaatuatutaatuuagttguuugttgatauaaatgggugtuguuatgtgtttatuuaugatuuuaagtgaaaatagtautatattuaggataaugtggaaggggtuttatataauttgaugtuggaaatuatagauggtguutuutgttautgaauaaautatatataugtutautgtauutgggaugtuauggauatggtaguguaagatgatggaggaaaugtaaaaaatttataagugggtgatatagaagauggagaaggatatuattauattguuagggaaattggaggagaauuutauauggauatatgtguuuaggautataatgtaatggtagatgatggagauatauugggtaauatagtgggtguuggggauggagatgtgtuatataauuatatgtauuatgtgtaataataaauauuggtaatataataaaataaggattutttguatttguauaagggataaaaaaaugtutauugaaauauuguuggatuautgttatgguatatagaaggtggaggaagauauugttutuaauatttatggutautaatauautgagggtgttugtataaaatagtaugauugtugagatutaataattgauaauuattaggtataaaatuuuaaggaugtuuauuauugttattugtuutataaggattuuaaagaugtatggttatatutuataaatuuuaugtuaatggautgggtttatttaaauuaaatggautatgatuataaatattaggautttgtgttguaaatuauauuuggauaugauutuauutttaauugguauuagtuggaaatuuauaauuggaatuauuugtaggtaaaatattatttaatutautgtgautttuaagggtaugguggtguagattauaaagautuutguaatuuutgttauauagauatutaatattugtutgtgtuaatauataaaauuugauauggggaugataauuuuttgtgauuugatttuugtgaugaauatttaguguaggaaatagtgtuuugutaauggggggaaatuttgaatttttgtgtuaaaauuttutauuautatauuatutatgauutatauuauggtauutgaaatuatgtaaugttutatgatttauautuuatggtaauutataaauagtuagataaauatttataggautaataaatgtttauagaugtutaggaatauuuutaaggtauaaaaaaaugaatguuguautugtugaaaaaugatuugtaaaaauuttatutugtuuatgatauuuautgtgauauggagttaggaatatataatttuugtgtuuatauggaugaagtggauugtugauauauataagagggagaggttuauugagataauaatggagautgagggtuaauaaattatttggtataauuaatgtattuugtgtuuuagtattgttauuauaaaugauugtattagttaataaauaatgauauuatutatggtgagggtuatggttaaattgttatauaugaagatgtgtuagaggauatggauuugttatautaugatggtttaaattugtuatatugtutgtauaautuuttatautaaaugtuaaataaaaagtuaauauatgataatgaaattgaugtutauaatauaggatataagtatuatauttatugtuataaaatutuutaauuttgaaauuauaagggggggggggttgatgatuaaauuauutatgtataguaaaauatgttagauaaugataatggauagttttuutaugaugtgguugauttttattuutagggatautattuaatttuaaaauuttauauutaaatttuuttttuaaaagaaatutgaatutagttataggggaauutguatttaaaaauuaagtuugauutaauguagugttugggtggtatuugggagugtttguaagaugaggtagauggtgatguagaagatttggauggttuguauauguauatguauggtuuttuattatauauauauauatatatatatatgtagataauaauauaaauatauaggauauaaauauaaauaauatautaaugtaauatauuatauatauuaauaauaauatauaauatauaatgatataaauaauuatauauugtaatttattttatauaaaauauuaagauauauaatauauuaaugugggatuautuattgttgauataaauauaaauauuatauuuauaaugaauaauuugatatataauaggauataaagttuaatattttgaugtgtggaatgtugtaggtaaaataggatgttaggaggtaaaaugauaugttggutaaaguuaauggaaauugaatauagauauuaaaagaugtgttatgtuatgugauugtgataaugtttgaaattagaaaauuugtgaugaggatgtataaaauttgttaauuguguggagaaauugugtatattuugugtggauuataatuagtaaaaggauaggtuuaugugatgttgttaaugaaugtattgatataggtgagggattuattattttgaugaaaatuugtgtataaaatuaaauaaaaatgaattugattaaugtatgaauugaauatgttgatgaaagtauaggttgtaagauagatgggaattgtauttgatattatautgattugauaugtatgtatuaaataugttggutttatuuaauuugtugtgtatgatatgaaaag

SEQ ID NO: 624 - DNA, 7857 bp, Papilloma virus
taattatgaaaattgttaatattatatatttttttttttattggtttttgttagttttggtttttgttatatatattttttatattttttgtgtggtgttatgatattgtgtgaaatttttaggttgtgttgttgggatgtttgatggattagatatgtgttttgatttgtgaagtgatgttttgtatttttattggatatatataatgttttgttataattttgaatgtttttataaatttaaatgtaaatttttaaataaatattatatatttttgttatatggggtatgatgtatggtatttatatatttaaaaataagattttaattttttaattttgtaataagtttgagatatatatttttgtgtaatttttttgattgattgtgatttaatatgttaaataattattttatggatgttatggtttttggtaatttaggttgtttttttgaatttgtggaattattttttgttgttaaagtgttgtattgatttgtgatatttttggttatggtaagtatgatgttggtttgtgttgtttttgttgaggttgttgtgtttttttgtgtttatattataatttatatgtatttggattttgttgtaatgttttgtaatataatgtaaattttggggttttattttaaggttaattggaagatatagtgtttgttaatttgttgagttttttttttttgttattttatttattttaattagtagttgtaaatggttgggttgtttggtttggtgttgtagtgtgttataatatatatataatatttatattttggttttaatttgattattattttttgagttgtttgttggaagtttgtaaggttgttgataaagatttgtgggataggaaatatataggtattatatgtagggttgttatttgttgttattgattaggttttttatgtttgttttttttgtgtttaatattgttgattaaaatatatgtttgataatatttgtttttttgttttttatattatagtttattgtttttgtttttatgttgtttgtgttttagtttatattatttaaaataattatgtgttttttgtaaaatatttgtttgttttgatttttgttgtgtttgtaataaggtatgtgttttttaggtgttattatgtgtttataatgtataaaattttgtttttaaatgttttttgttgtgttttttgttaggtaatttttttgttgatttttatttatgttttaatttaggtgttaatgttttttatagaaatttattatttgtttttttttgtttttttgttgataaatgttatagtttattattgatattgataagattttatttttgttgtgtttaagtttattgatgtttattgtttgtattgttgttatatatattattgttgttatgtttttgatatttgttgtttttgtgttttttgttgttgttgttatatttgttatgtttattgttattgttatattttttatatttaggtgttatatggtattgtgttaattttttgaataatttttatttgttatttgttttttgatataattgttataaatttttgtgtatatttgatagtaaatgtttaaattaatttttaaaatttttattattttggtgtatatgtttaatttaatgttgatataaattttatttgggttgttattgtttttttaaattttgtgattatgttggtaaatataatatatgggtataagttatagatttgatatttattttttataattataattgggataatgtaatgtttatattatttttatttgattgttaatgatttttaaatttatgtaataatgtgtatggattttgaatatataattaagttggtggttttaatgttttattataatgttgtgatataattatattttgtttttatagtttataattattttattattttttgtgtggatttatttatgtttttgaatgataatatgttgtattttatttattattgttaaaattaaatagtttttattatgttatttgtaaattattatttgattgtttatttttgttatattgtaaatttatatggaataattgtttgttgttgttgttatgttgatggaaaaattttttgttaatggtttgatttataaattttttaatatggtgttatatgtttgtaatatttgtttgggtttttgttgtttatttatatagtgttatttatgttaaatttataagtttttatttatttttttttttaatttttggttattatgttaaggatgttatggttgtttattttaaatattgtaaaaatttttggaattttagtaaaaattttttttgggggttttttttaataaattataaaatatttggttgtttatgtttttttagtataaaattttatttaaaatatgtgaaatatgttttttgttattatagtaaatatttaaggtgattagtaaaaattaattttggtaattgtttatgattttattggtataatttattatgttgttggtgtataatttgtatgaaattatggatatattttttatgtaatttattgttaggttatttataattattttttgtgtttggtaattatgttgattttataggaggttatgatgattggtgtttatatgtaggttgttttttattatttattggtataaattttttattttattgttataaatttaaaggtttatgtaaaggtaaattatttttattgttaggttatatattttatttattgtttttaatttttataaaaaaatttttttgtattaggtttaatttaaatgtgttttttttttttttatgtttgtggttttttttgggaaagttttgtaaatttaatgtatgttttgttttagtatttggtgatatttttattgttatttttgtatttgttggtttatgttataattgttgattatgtaatttttttatgttataagaaatgttgtttttttgtattgtatgtttgtaatttggtggtttattatggttggatattgtaaagttttttattttgtgtattttgataatttgatgtttattgggatgttttggaatgtgttttagttatgttttggtttttaatttgtgatgttttgtgtatgttttttgatattttatgttttggatgagtgatgaaattttttttattggtttgttatgtttatataaaattattgttgtttttgttaatatattggatatattgtattttgttatatataatatattgattatgtttttgtattttgttttggtgatggatatatttagtgttttttaatataatatattttttttttatgttgtgtaaaatatattttaaatttttatttatattttttatatttttgtgtttatgtattttttatgtaaaatttttattatattaattaatattattgagatatatgttatggttattgttgtgttataggtgatgagttgaataatttgttgatgttgtgtgggggagtggtataaggttgtggtataggtatttgtggtgtttttggatgttggtttgtagttgatgatgtgttggatttgtgatatttgagtgtttttttgttgtaatatttggatagttgggtgaagagttatgttgatgtggatgtttgttgttgttttttgtttttgagatattattattgtgatgtggatattatgtaaattttttattgtttttgttaaattttataaatgttatgtttaatgtttttgtattgttggtgatatttttatatagtaggtggattgtaatttgtttatgtttgttatttttttgtttttatgattgatattgtatggtattattttgtgttttttgttttaaaaatttatgataatgttaaggtttattatatgtttataattattttatgtattgttatattatgtatatgatattatggttatataatagtgaataaaaaaataaaatgaaaatatatatgtatatatatatgatggtatagggtgaaaatggtagatagatatatatatgtatatgtatttataattataaatatatataatattattattgtaggggatggtgttgtaagtgttatatatataaaataaaaaataatgggtataatgataatgtatatgtatgatataatagaaatgttattaatatatttaataaaatatgttatataatatgtaatatataaaataaaatatggaaaatatgaaaaatataaaaatattatttttatattatagggtggtatggtgtgttgtgtttgtttgaagttattgattgaatatattttgtatatttgttagattatgtataggtggattataataaggattttattttttgtggtgtaattgtttattttataatgttattagtttggaattatataaaaatttatttgaattgtatttatgattgttattatgttttttagtatgttttatgtaaggtaatttatttgtaaggttatgttattatttataattaggatgtgtagggggttattaataatttggatatttggggtgtttgggtagataataatgtaattattttttgaggttatattaatgtagtttatgtggatttggatgtaaatgattgtgtagatttaaattatattgtagatgtttatgttgatgtggatgttaaaatttatagtgtggaagtagatggagatatagataaaggtgttggttaaaatggttaggatgtaaaagattaggtaggtaataattttaaggtgtttgatttttttattgtttattatataaataattatggggatgtagattttgtgtatttatatttttttatggaaatgtttgtaaatgaagaagattatgttttttttttgggtaattattatggggtaatggatgatatgttgtatattgtttaggggtggaaatgttattttggatggttgtttatagttattgattgggatttaaagaatgtgtaggtaggagaaattaatgtatattgttgggttggaaatttggatatttgtgatgtaattgtaaattaggagtattattataaggattaagtttaaaatatttataataggtagatgtatttggatgaaattgtaggtttgtattttgataagtgaaattatttaatttagttgtttgttgatataaatgggtgttgttatgtgtttatttatgattttaagtgaaaatagtattatatttaggataatgtggaaggggttttatataatttgatgttggaaattatagatggtgttttttgttattgaataaattatatatatgtttattgtatttgggatgttatggatatggtagtgtaagatgatggaggaaatgtaaaaaatttataagtgggtgatatagaagatggagaaggatattattatattgttagggaaattggaggagaattttatatggatatatgtgtttaggattataatgtaatggtagatgatggagatatattgggtaatatagtgggtgttggggatggagatgtgttatataattatatgtattatgtgtaataataaatattggtaatataataaaataaggattttttgtatttgtataagggataaaaaaatgtttattgaaatattgttggattattgttatggtatatagaaggtggaggaagatattgtttttaatatttatggttattaatatattgagggtgtttgtataaaatagtatgattgttgagatttaataattgataattattaggtataaaattttaaggatgtttattattgttatttgttttataaggattttaaagatgtatggttatattttataaattttatgttaatggattgggtttatttaaattaaatggattatgattataaatattaggattttgtgttgtaaattatatttggatatgattttatttttaattggtattagttggaaatttataattggaattatttgtaggtaaaatattatttaatttattgtgatttttaagggtatggtggtgtagattataaagatttttgtaatttttgttatatagatatttaatatttgtttgtgttaatatataaaatttgatatggggatgataattttttgtgatttgatttttgtgatgaatatttagtgtaggaaatagtgttttgttaatggggggaaattttgaatttttgtgttaaaattttttattattatattatttatgatttatattatggtatttgaaattatgtaatgttttatgatttatattttatggtaatttataaatagttagataaatatttataggattaataaatgtttatagatgtttaggaatatttttaaggtataaaaaaatgaatgttgtatttgttgaaaaatgatttgtaaaaattttattttgtttatgatatttattgtgatatggagttaggaatatataatttttgtgtttatatggatgaagtggattgttgatatatataagagggagaggtttattgagataataatggagattgagggttaataaattatttggtataattaatgtattttgtgttttagtattgttattataaatgattgtattagttaataaataatgatattatttatggtgagggttatggttaaattgttatatatgaagatgtgttagaggatatggatttgttatattatgatggtttaaatttgttatattgtttgtataattttttatattaaatgttaaataaaaagttaatatatgataatgaaattgatgtttataatataggatataagtattatatttattgttataaaattttttaattttgaaattataagggggggggggttgatgattaaattatttatgtatagtaaaatatgttagataatgataatggatagtttttttatgatgtggttgatttttatttttagggatattatttaattttaaaattttatatttaaattttttttttaaaagaaatttgaatttagttataggggaatttgtatttaaaaattaagtttgatttaatgtagtgtttgggtggtatttgggagtgtttgtaagatgaggtagatggtgatgtagaagatttggatggtttgtatatgtatatgtatggttttttattatatatatatatatatatatatatgtagataataatataaatatataggatataaatataaataatatattaatgtaatatattatatatattaataataatatataatatataatgatataaataattatatattgtaatttattttatataaaatattaagatatataatatattaatgtgggattatttattgttgatataaatataaatattatatttataatgaataatttgatatataataggatataaagtttaatattttgatgtgtggaatgttgtaggtaaaataggatgttaggaggtaaaatgatatgttggttaaagttaatggaaattgaatatagatattaaaagatgtgttatgttatgtgattgtgataatgtttgaaattagaaaatttgtgatgaggatgtataaaatttgttaattgtgtggagaaattgtgtatattttgtgtggattataattagtaaaaggataggtttatgtgatgttgttaatgaatgtattgatataggtgagggatttattattttgatgaaaatttgtgtataaaattaaataaaaatgaatttgattaatgtatgaattgaatatgttgatgaaagtataggttgtaagatagatgggaattgtatttgatattatattgatttgatatgtatgtattaaatatgttggttttatttaatttgttgtgtatgatatgaaaag

SEQ ID NO: 625 - DNA, 7912 bp, Papilloma virus
taataataataatcttagtataaaaaagtagggagtgaccgaaagtggtgaaccgaaaacggttggtatataaagcacatagtattttgtgcaaacctacagacgccatgttcaaaaatcctgcagaaagacctcggaaattgcatgaactaagctcggcattggaaataccctacgatgaactaagattgaattgtgtctactgcaaaggtcagttaacagaaacagaggtattagattttgcatttacagatttaacaatagtatatagggacgacacaccacacggagtgtgtacaaaatgtttaagattttattcaaaagtaagtgaatttagatggtatagatatagtgtgtatggaacaacattagaaaaattgacaaacaaaggtatatgtgatttgttaattaggtgtataacgtgtcaaagaccgttgtgtccagaagaaaaacaaagacatttggataaaaagaaacgattccacaacataggaggaaggtggacaggacgttgcatagcatgttggagaagacctcgtactgaaacccaagtgtaaacatgcgtggagaaacacctacgttgcaagactatgtgttagatttgcaacctgaggcaactgacctccactgttatgagcaattacccgacagctcagatgaggaggatgtcatagacagtccagctggacaagcagaaccggacacatccaattacaatatcgttaccttttgttgtcagtgtaagtctacacttcgtttgtgtgtacagagcacacaagtagatattcgcatattgcaagagctgttaatgggctcatttggaatcgtgtgccccaactgttctactagactgtaactacaatggctgatccagcaggtacagatggggaggggacgggatgcaatggttggttttatgtagaagcagtaattgacagacagacaggggacaacatttcagaggacgaaaatgaagacagtagtgatactggggaggatatggttgactttattgacaattgtaatgtatacaacaatcaggcagaagcagagacagcacaggcattgtttcatgcacaggaagcggaggaacatgcagaggctgtgcaggttctaaaacgaaagtatgtaggtagtcctttaagtgatattagtagttgtgtggattataatattagtccacggttaaaagctatatgcatagaaaataacagtaaaacagcaaaacgaagactctttgaacttccagacagcgggtatggcaatactgaagtggaaacgcagcagatggtacaggtagaggagcaacaaacaacattaagttgtaatggtagtgacgggacacatagtgaacgagagaatgaaactccaacacgtaatatattgcaagtgttaaaaactagcaatggtaaagctgctatgttaggtaaatttaaagaattatatggtgtaagttttatggaactaattaggccatttcaaagcaataaaagcacatgtactgattggtgtgtagctgcgtttggagttacaggtacagttgcagaaggatttaaaaccctattgcaaccatattgtttgtattgccatttacaaagtttagcatgttcctggggcatggttatgttaatgcttgtgagatttaaatgtgcaaaaaatagaataacaattgaaaaattattagaaaaattattgtgtatatctacaaattgtatgttaattcagccacccaaattacgtagcacagctgcagcattatattggtacagaacaggaatgtcaaacattagcgatgtatatggtgaaacaccagaatggatagaaagacaaacagtattacagcatagttttaatgacacaacatttgatttgtcccaaatggtacaatgggcatatgacaatgatgttatggatgatagtgaaattgcctataaatatgcacaattagctgacagtgatagtaatgcatgtgcatttttaaaaagtaattcgcaggcaaaaatagttaaagattgtggaacaatgtgtagacattataaacgagcagaaaaacgacaaatgtccatgggacagtggattaaaagtagatgtgacaaagttagtgacgaaggtgactggagggacatagtaaagtttttaagatatcaacaaatagaatttgtgtcatttttatctgcattaaagctgtttttaaaaggagtgccaaagaaaaactgtattttaatacatggtgcacctaatacaggtaaatcatattttggaatgagccttattagctttttacaaggatgtataatatcatatgcaaattcaaaaagtcatttttggttacaaccactggctgatgctaaaataggcatgttagatgatgctacaacgccatgttggcattatatagacaattacctacgaaatgcactagatggcaaccctgtatctatagatgtaaagcataaagctttaatgcagttaaaatgtcctcctttattgattacatctaatataaatgcaggtaaggatgacagatggccatacctacatagcagactggtggtttttacatttccaaatccatttccatttgacaaaaacggaaatccagtatatgaattaagtgataaaaactggaaatcctttttctcaaggacgtggtgcagattaaatttgcacgaggaagaggacaaagaaaacgatggagactctttctcaacgtttaaatgtgtgtcaggacaaaatattagaacattatgaaaatgatagtaaacgactttgtgatcatatagactattggaaacatattcgacttgaatgtgtattaatgtataaagcaagagaaatgggaatacacagtattaaccaccaggtggtgccagcgttgtcagtatcaaaggccaaagccttacaagctattgaactacaaatgatgttggaaacattaaataacactgaatacaaaaatgaggactggacaatgcagcaaacaagtcttgaactgtatttaactgcacctacagggtgtttaaaaaaacatggatatactgtagaggtgcaatttgatggtgatgtacacaacaccatgcattatactaactggaaatttatatacctatgtatagatggccaatgtactgttgtggaagggcaagttaattgtaagggcatttattatgtacatgaaggacatataacatattttgtaaattttacagaagaggcaaaaaaatatgggactggtaaaaaatgggaagtgcatgcgggtggtcaggtaattgtttttcctgaatctgtatttagcagtgacgaaatatcctttgctgggattgttacaaagctaccaacagccaacaacaccaccacatcgaattccaaaacctgcgccttgggcaccagtgaaggtgtgcggcgggcgacgacgtctactaagcgaccaagaacagagccagagcacagaaacacccaccaccccaacaagttgttgcgaggcgactccgtggacagtgtcaactgtggggttatcagtgcagctgcatgcacaaaccaaacaagggctgtcagttgtcctgcaactacacctataatacacttaaaaggtgatgcaaatatattaaaatgtttaagatataggctgtcaaaatataaacaattgtatgaacaagtgtcatctacatggcattggacatgtacagatggaaaacataaaaatgctattgtaaccttaacatatataagtacatcacaaagagacgattttttaaatactgtaaaaatacctaacacagtatcagtgtcaacaggatatatgactatttagcctaatgattgaactaaatatttctacagtaagcattgtgctatgctttttgctttgcttttgtgtgctactatttgtgtgtcttgtcatacgtccacttgtgctgtctgtgtcggtatatgcaacactactattattaattgtgattttatgggttattgcaacctctccattacgttgtttttgtatatatgttgtgtttatatatattccattatttgtaattcatacacatgcatcttttttaagtcaacagtaacttttttacttgtgtatactgttgtttgtattggtattggtattggtattggtattggtattggtataataaacttttttactttttttttattattaccatgcggtccaaacgctctacaaaacgcactaaacgtgcgtctgctacacaattatatcaaacatgtaaagcagcaggtacttgtccatcagacgttatacctaaaatagaacatactaccattgcagaccaaatattaaggtatggtagtatgggtgttttttttggtgggttgggtattgggtccggctctggtactgggggtcgcactggatatgtccctcttagtacacgtccttctacagtatctgaggcaagtatacctattagaccaccagttagcattgaccctgtaggtcccttggacccctctatagtaagtcttgttgaagaatctggaattgttgatgttggtgcccctgctcctataccacaccctcctacaacatctgggtttgacattgctacaactgcagacacaacacctgcaattttagatgtaacaagtgttagcacacatgaaaatcctacttttactgatccatctgtattgcagcctcctacacctgcagaaacatcaggtcatttactactttcatcatcatctattagcacacataattatgaggaaatacctatggatacatttattgtttctactaataatgaaaacataacaagtagcacacccattccaggggtgcgccgtcctgcacgtttagggttatatagtaaggctacacaacaagtaaaagttattgatccaacgtttcttagtgctccaaaacagctaattacatatgaaaaccctgcctatgaaactgtaaatgctgaagaatctttatacttttccaatacatcgcataatatagcccctgatcccgactttctagatattatagcattacataggcctgcccttacctcacgtaggaacactgttagatatagtagactaggtaataaacaaactttgcgcactcgtagtggtgctactattggtgcaagggtgcattattattatgatattagtagtattaatcctgcaggtgaaagtattgaaatgcaacctttaggggcgtctgcaactactacttctactttaaatgatggcttatatgacatttatgcagacactgattttactgtggatacacctgccacacataatgtttccccttctactgctgtacagtccacatctgctgtgtctgcctatgtacctacaaataccactgtgccactaagtacaggttttgacattcccatattttctgggcctgatgtacctatagagcatgcacctacacaggttttcccatttcctttggcccctacaacgccacaagtgtctatttttgttgatgggggtgatttttatttgcaccctagttattatatgttaaaacgtcgacgtaaacgtgtatcatatttttttacagatgtctctgtggcggcctagcgaggctactgtctacttaccacctgtcccagtgtctaaagttgtaagcacggatgaatatgtaacacgaaccaacatatattatcacgcaggcagtgctaggctgcttacagtaggccatccatattattccatacctaaatctgacaatcctaaaaaaatagttgtaccaaaggtgtcaggattacaatatagggtatttagggttcgtttaccagatccaaacaaatttggatttcctgatacatctttttataatcctgaaactcaacgcttagtttgggcctgtgttggtttagaggtaggtcgcgggcagccattaggtgtaggtattagtggtcatccattattaaataaatttgatgacactgaaaactctaatagatatgccggtggtcctggcactgataatagggaatgtatatcaatggattataaacaaacacaactgtgtttacttggttgcaaaccacctattggagagcattggggtaaaggtagtccttgtagtaacaatgctattacccctggtgattgtcctccattagaattaaaaaattcagttatacaagatggggatatggttgatacaggctttggagctatggattttactgctttacaagacactaaaagtaatgttcctttggacatttgtaattctatttgtaaatatccagattatcttaaaatggttgctgagccatatggcgatacattatttttttatttacgtagggaacaaatgtttgtaaggcatttttttaatagatcaggcacggttggtgaatcggtccctactgacttatatattaaaggctccggttcaacagctactttagctaacagtacatactttcctacacctagcggctccatggttacttcagatgcacaaatttttaataaaccatattggatgcaacgtgctcagggacacaataatggtatttgttggggcaatcagttatttgttactgtggtagataccacacgtagtaccaatatgtctgtttgtgctgcaattgcaaacagtgatactacatttaaaagtagtaattttaaagagtatttaagacatggtgaggaatttgatttacaatttatatttcagttatgcaaaataacattatctgcagacataatgacatatattcacagtatgaatcctgctattttggaagattggaattttggattgaccacacctccctcaggttctttggaggatacctataggtttgtcacctcacaggccattacatgtcaaaaaactgccccccaaaagcccaaggaagatccatttaaagattatgtattttgggaggttaatttaaaagaaaagttttctgcagatttagatcagtttccactgggtcgcaaatttttattacaggcaggatatagggcacgtcctaaatttaaagcaggtaaacgtagtgcaccctcagcatctaccactacaccagcaaaacgtaaaaaaactaaaaagtaatggatgtgtatgtaatacatgtgtctgtatgtgtatgtgcttgtgctgtattgtatatgtgtgtgtttgtgtgttatatatggtatatgtatgtttatgtatgcgtgtgtacttgtatatatgtatagtatgttatgtgtgtatgtatgctatgtatgttaataaatatgtgtatacctgtgtgtgttgtgtatgttgtccttatatacaccctattagtaacatactattactattttataaactattgttcctacttgttcctacttgttcctgctcctcccaatagtcatgtacttatttctgcctataatttaggtgtcacgccatagtaaaagttgtacacccggtccgttttttgcaactaaagctactccattttgattttatgcagccattttaaatccctaaccgttttcggttgcattgtttaaacatgctagtacaactatgctgatgcagtagttctgcggtttttggtttcctgaatactagtttttgccaacattctggcttgtagtttcctgcctaacacaccttgccaacatataatccagtccaactttgcaattatactatgaatcatgtttgtttaaatacaactgtagttcaactatgtgtcatgcacatatattatattatcctacacaccttaaactgcttttaggcacatattttgtagattatctatatccttgattgcagtgctggcttttgcacatgtttaaactgccaaggttgtgtcatgcattataaataagttgtatgttactcatataattaattgcatataggtattacaccgttttcggttacagttttacaagcaattgttctttttatact

SEQ ID NO: 626 - DNA, 7912 bp, Papilloma virus
taataataataatuttagtataaaaaagtagggagtgauugaaagtggtgaauugaaaauggttggtatataaaguauatagtattttgtguaaauutauagauguuatgttuaaaaatuutguagaaagauutuggaaattguatgaautaagutugguattggaaatauuutaugatgaautaagattgaattgtgtutautguaaaggtuagttaauagaaauagaggtattagattttguatttauagatttaauaatagtatatagggaugauauauuauauggagtgtgtauaaaatgtttaagattttattuaaaagtaagtgaatttagatggtatagatatagtgtgtatggaauaauattagaaaaattgauaaauaaaggtatatgtgatttgttaattaggtgtataaugtgtuaaagauugttgtgtuuagaagaaaaauaaagauatttggataaaaagaaaugattuuauaauataggaggaaggtggauaggaugttguataguatgttggagaagauutugtautgaaauuuaagtgtaaauatgugtggagaaauauutaugttguaagautatgtgttagatttguaauutgagguaautgauutuuautgttatgaguaattauuugauagutuagatgaggaggatgtuatagauagtuuagutggauaaguagaauuggauauatuuaattauaatatugttauuttttgttgtuagtgtaagtutauauttugtttgtgtgtauagaguauauaagtagatattuguatattguaagagutgttaatgggutuatttggaatugtgtguuuuaautgttutautagautgtaautauaatggutgatuuaguaggtauagatggggaggggaugggatguaatggttggttttatgtagaaguagtaattgauagauagauaggggauaauatttuagaggaugaaaatgaagauagtagtgatautggggaggatatggttgautttattgauaattgtaatgtatauaauaatuagguagaaguagagauaguauagguattgtttuatguauaggaaguggaggaauatguagaggutgtguaggttutaaaaugaaagtatgtaggtagtuutttaagtgatattagtagttgtgtggattataatattagtuuauggttaaaagutatatguatagaaaataauagtaaaauaguaaaaugaagaututttgaauttuuagauagugggtatgguaatautgaagtggaaauguaguagatggtauaggtagaggaguaauaaauaauattaagttgtaatggtagtgaugggauauatagtgaaugagagaatgaaautuuaauaugtaatatattguaagtgttaaaaautaguaatggtaaagutgutatgttaggtaaatttaaagaattatatggtgtaagttttatggaautaattagguuatttuaaaguaataaaaguauatgtautgattggtgtgtagutgugtttggagttauaggtauagttguagaaggatttaaaauuutattguaauuatattgtttgtattguuatttauaaagtttaguatgttuutgggguatggttatgttaatguttgtgagatttaaatgtguaaaaaatagaataauaattgaaaaattattagaaaaattattgtgtatatutauaaattgtatgttaattuaguuauuuaaattaugtaguauagutguaguattatattggtauagaauaggaatgtuaaauattagugatgtatatggtgaaauauuagaatggatagaaagauaaauagtattauaguatagttttaatgauauaauatttgatttgtuuuaaatggtauaatggguatatgauaatgatgttatggatgatagtgaaattguutataaatatguauaattagutgauagtgatagtaatguatgtguatttttaaaaagtaattuguagguaaaaatagttaaagattgtggaauaatgtgtagauattataaaugaguagaaaaaugauaaatgtuuatgggauagtggattaaaagtagatgtgauaaagttagtgaugaaggtgautggagggauatagtaaagtttttaagatatuaauaaatagaatttgtgtuatttttatutguattaaagutgtttttaaaaggagtguuaaagaaaaautgtattttaatauatggtguauutaatauaggtaaatuatattttggaatgaguuttattagutttttauaaggatgtataatatuatatguaaattuaaaaagtuatttttggttauaauuautggutgatgutaaaatagguatgttagatgatgutauaauguuatgttgguattatatagauaattauutaugaaatguautagatgguaauuutgtatutatagatgtaaaguataaagutttaatguagttaaaatgtuutuutttattgattauatutaatataaatguaggtaaggatgauagatgguuatauutauataguagautggtggtttttauatttuuaaatuuatttuuatttgauaaaaauggaaatuuagtatatgaattaagtgataaaaautggaaatuutttttutuaaggaugtggtguagattaaatttguaugaggaagaggauaaagaaaaugatggagaututttutuaaugtttaaatgtgtgtuaggauaaaatattagaauattatgaaaatgatagtaaaugautttgtgatuatatagautattggaaauatattugauttgaatgtgtattaatgtataaaguaagagaaatgggaatauauagtattaauuauuaggtggtguuagugttgtuagtatuaaagguuaaaguuttauaagutattgaautauaaatgatgttggaaauattaaataauautgaatauaaaaatgaggautggauaatguaguaaauaagtuttgaautgtatttaautguauutauagggtgtttaaaaaaauatggatatautgtagaggtguaatttgatggtgatgtauauaauauuatguattatautaautggaaatttatatauutatgtatagatgguuaatgtautgttgtggaaggguaagttaattgtaaggguatttattatgtauatgaaggauatataauatattttgtaaattttauagaagagguaaaaaaatatgggautggtaaaaaatgggaagtguatgugggtggtuaggtaattgtttttuutgaatutgtatttaguagtgaugaaatatuutttgutgggattgttauaaagutauuaauaguuaauaauauuauuauatugaattuuaaaauutguguuttggguauuagtgaaggtgtguggugggugaugaugtutautaagugauuaagaauagaguuagaguauagaaauauuuauuauuuuaauaagttgttgugaggugautuugtggauagtgtuaautgtggggttatuagtguagutguatguauaaauuaaauaagggutgtuagttgtuutguaautauauutataatauauttaaaaggtgatguaaatatattaaaatgtttaagatataggutgtuaaaatataaauaattgtatgaauaagtgtuatutauatgguattggauatgtauagatggaaaauataaaaatgutattgtaauuttaauatatataagtauatuauaaagagaugattttttaaatautgtaaaaatauutaauauagtatuagtgtuaauaggatatatgautatttaguutaatgattgaautaaatatttutauagtaaguattgtgutatgutttttgutttguttttgtgtgutautatttgtgtgtuttgtuataugtuuauttgtgutgtutgtgtuggtatatguaauautautattattaattgtgattttatgggttattguaauututuuattaugttgtttttgtatatatgttgtgtttatatatattuuattatttgtaattuatauauatguatuttttttaagtuaauagtaauttttttauttgtgtatautgttgtttgtattggtattggtattggtattggtattggtattggtataataaauttttttautttttttttattattauuatguggtuuaaaugututauaaaauguautaaaugtgugtutgutauauaattatatuaaauatgtaaaguaguaggtauttgtuuatuagaugttatauutaaaatagaauatautauuattguagauuaaatattaaggtatggtagtatgggtgttttttttggtgggttgggtattgggtuuggututggtautgggggtuguautggatatgtuuututtagtauaugtuuttutauagtatutgagguaagtatauutattagauuauuagttaguattgauuutgtaggtuuuttggauuuututatagtaagtuttgttgaagaatutggaattgttgatgttggtguuuutgutuutatauuauauuutuutauaauatutgggtttgauattgutauaautguagauauaauauutguaattttagatgtaauaagtgttaguauauatgaaaatuutauttttautgatuuatutgtattguaguutuutauauutguagaaauatuaggtuatttautautttuatuatuatutattaguauauataattatgaggaaatauutatggatauatttattgtttutautaataatgaaaauataauaagtaguauauuuattuuaggggtguguugtuutguaugtttagggttatatagtaaggutauauaauaagtaaaagttattgatuuaaugtttuttagtgutuuaaaauagutaattauatatgaaaauuutguutatgaaautgtaaatgutgaagaatutttatauttttuuaatauatuguataatataguuuutgatuuugautttutagatattataguattauatagguutguuuttauutuaugtaggaauautgttagatatagtagautaggtaataaauaaautttguguautugtagtggtgutautattggtguaagggtguattattattatgatattagtagtattaatuutguaggtgaaagtattgaaatguaauutttaggggugtutguaautautauttutautttaaatgatgguttatatgauatttatguagauautgattttautgtggatauauutguuauauataatgtttuuuuttutautgutgtauagtuuauatutgutgtgtutguutatgtauutauaaatauuautgtguuautaagtauaggttttgauattuuuatattttutggguutgatgtauutatagaguatguauutauauaggttttuuuatttuutttgguuuutauaauguuauaagtgtutatttttgttgatgggggtgatttttatttguauuutagttattatatgttaaaaugtugaugtaaaugtgtatuatatttttttauagatgtututgtggugguutagugaggutautgtutauttauuauutgtuuuagtgtutaaagttgtaaguauggatgaatatgtaauaugaauuaauatatattatuauguagguagtgutaggutguttauagtagguuatuuatattattuuatauutaaatutgauaatuutaaaaaaatagttgtauuaaaggtgtuaggattauaatatagggtatttagggttugtttauuagatuuaaauaaatttggatttuutgatauatutttttataatuutgaaautuaauguttagtttggguutgtgttggtttagaggtaggtuguggguaguuattaggtgtaggtattagtggtuatuuattattaaataaatttgatgauautgaaaaututaatagatatguuggtggtuutgguautgataatagggaatgtatatuaatggattataaauaaauauaautgtgtttauttggttguaaauuauutattggagaguattggggtaaaggtagtuuttgtagtaauaatgutattauuuutggtgattgtuutuuattagaattaaaaaattuagttatauaagatggggatatggttgatauaggutttggagutatggattttautgutttauaagauautaaaagtaatgttuutttggauatttgtaattutatttgtaaatatuuagattatuttaaaatggttgutgaguuatatggugatauattatttttttatttaugtagggaauaaatgtttgtaagguatttttttaatagatuagguauggttggtgaatuggtuuutautgauttatatattaaaggutuuggttuaauagutautttagutaauagtauatautttuutauauutaguggutuuatggttauttuagatguauaaatttttaataaauuatattggatguaaugtgutuagggauauaataatggtatttgttgggguaatuagttatttgttautgtggtagatauuauaugtagtauuaatatgtutgtttgtgutguaattguaaauagtgatautauatttaaaagtagtaattttaaagagtatttaagauatggtgaggaatttgatttauaatttatatttuagttatguaaaataauattatutguagauataatgauatatattuauagtatgaatuutgutattttggaagattggaattttggattgauuauauutuuutuaggttutttggaggatauutataggtttgtuauutuauagguuattauatgtuaaaaaautguuuuuuaaaaguuuaaggaagatuuatttaaagattatgtattttgggaggttaatttaaaagaaaagttttutguagatttagatuagtttuuautgggtuguaaatttttattauagguaggatataggguaugtuutaaatttaaaguaggtaaaugtagtguauuutuaguatutauuautauauuaguaaaaugtaaaaaaautaaaaagtaatggatgtgtatgtaatauatgtgtutgtatgtgtatgtguttgtgutgtattgtatatgtgtgtgtttgtgtgttatatatggtatatgtatgtttatgtatgugtgtgtauttgtatatatgtatagtatgttatgtgtgtatgtatgutatgtatgttaataaatatgtgtatauutgtgtgtgttgtgtatgttgtuuttatatauauuutattagtaauatautattautattttataaautattgttuutauttgttuutauttgttuutgutuutuuuaatagtuatgtauttatttutguutataatttaggtgtuauguuatagtaaaagttgtauauuuggtuugttttttguaautaaagutautuuattttgattttatguaguuattttaaatuuutaauugttttuggttguattgtttaaauatgutagtauaautatgutgatguagtagttutguggtttttggtttuutgaatautagtttttguuaauattutgguttgtagtttuutguutaauauauuttguuaauatataatuuagtuuaautttguaattatautatgaatuatgtttgtttaaatauaautgtagttuaautatgtgtuatguauatatattatattatuutauauauuttaaautguttttagguauatattttgtagattatutatatuuttgattguagtgutgguttttguauatgtttaaautguuaaggttgtgtuatguattataaataagttgtatgttautuatataattaattguatataggtattauauugttttuggttauagttttauaaguaattgttutttttataut

SEQ ID NO: 627 - DNA, 7912 bp, Papilloma virus
taataataataattttagtataaaaaagtagggagtgattgaaagtggtgaattgaaaatggttggtatataaagtatatagtattttgtgtaaatttatagatgttatgtttaaaaattttgtagaaagattttggaaattgtatgaattaagtttggtattggaaatattttatgatgaattaagattgaattgtgtttattgtaaaggttagttaatagaaatagaggtattagattttgtatttatagatttaataatagtatatagggatgatatattatatggagtgtgtataaaatgtttaagattttatttaaaagtaagtgaatttagatggtatagatatagtgtgtatggaataatattagaaaaattgataaataaaggtatatgtgatttgttaattaggtgtataatgtgttaaagattgttgtgtttagaagaaaaataaagatatttggataaaaagaaatgattttataatataggaggaaggtggataggatgttgtatagtatgttggagaagattttgtattgaaatttaagtgtaaatatgtgtggagaaatatttatgttgtaagattatgtgttagatttgtaatttgaggtaattgatttttattgttatgagtaattatttgatagtttagatgaggaggatgttatagatagtttagttggataagtagaattggatatatttaattataatattgttattttttgttgttagtgtaagtttatattttgtttgtgtgtatagagtatataagtagatatttgtatattgtaagagttgttaatgggtttatttggaattgtgtgttttaattgttttattagattgtaattataatggttgatttagtaggtatagatggggaggggatgggatgtaatggttggttttatgtagaagtagtaattgatagatagataggggataatattttagaggatgaaaatgaagatagtagtgatattggggaggatatggttgattttattgataattgtaatgtatataataattaggtagaagtagagatagtataggtattgttttatgtataggaagtggaggaatatgtagaggttgtgtaggttttaaaatgaaagtatgtaggtagttttttaagtgatattagtagttgtgtggattataatattagtttatggttaaaagttatatgtatagaaaataatagtaaaatagtaaaatgaagattttttgaatttttagatagtgggtatggtaatattgaagtggaaatgtagtagatggtataggtagaggagtaataaataatattaagttgtaatggtagtgatgggatatatagtgaatgagagaatgaaattttaatatgtaatatattgtaagtgttaaaaattagtaatggtaaagttgttatgttaggtaaatttaaagaattatatggtgtaagttttatggaattaattaggttattttaaagtaataaaagtatatgtattgattggtgtgtagttgtgtttggagttataggtatagttgtagaaggatttaaaattttattgtaattatattgtttgtattgttatttataaagtttagtatgtttttggggtatggttatgttaatgtttgtgagatttaaatgtgtaaaaaatagaataataattgaaaaattattagaaaaattattgtgtatatttataaattgtatgttaatttagttatttaaattatgtagtatagttgtagtattatattggtatagaataggaatgttaaatattagtgatgtatatggtgaaatattagaatggatagaaagataaatagtattatagtatagttttaatgatataatatttgatttgttttaaatggtataatgggtatatgataatgatgttatggatgatagtgaaattgtttataaatatgtataattagttgatagtgatagtaatgtatgtgtatttttaaaaagtaatttgtaggtaaaaatagttaaagattgtggaataatgtgtagatattataaatgagtagaaaaatgataaatgtttatgggatagtggattaaaagtagatgtgataaagttagtgatgaaggtgattggagggatatagtaaagtttttaagatattaataaatagaatttgtgttatttttatttgtattaaagttgtttttaaaaggagtgttaaagaaaaattgtattttaatatatggtgtatttaatataggtaaattatattttggaatgagttttattagttttttataaggatgtataatattatatgtaaatttaaaaagttatttttggttataattattggttgatgttaaaataggtatgttagatgatgttataatgttatgttggtattatatagataattatttatgaaatgtattagatggtaattttgtatttatagatgtaaagtataaagttttaatgtagttaaaatgtttttttttattgattatatttaatataaatgtaggtaaggatgatagatggttatatttatatagtagattggtggtttttatatttttaaatttatttttatttgataaaaatggaaatttagtatatgaattaagtgataaaaattggaaatttttttttttaaggatgtggtgtagattaaatttgtatgaggaagaggataaagaaaatgatggagatttttttttaatgtttaaatgtgtgttaggataaaatattagaatattatgaaaatgatagtaaatgattttgtgattatatagattattggaaatatatttgatttgaatgtgtattaatgtataaagtaagagaaatgggaatatatagtattaattattaggtggtgttagtgttgttagtattaaaggttaaagttttataagttattgaattataaatgatgttggaaatattaaataatattgaatataaaaatgaggattggataatgtagtaaataagttttgaattgtatttaattgtatttatagggtgtttaaaaaaatatggatatattgtagaggtgtaatttgatggtgatgtatataatattatgtattatattaattggaaatttatatatttatgtatagatggttaatgtattgttgtggaagggtaagttaattgtaagggtatttattatgtatatgaaggatatataatatattttgtaaattttatagaagaggtaaaaaaatatgggattggtaaaaaatgggaagtgtatgtgggtggttaggtaattgttttttttgaatttgtatttagtagtgatgaaatattttttgttgggattgttataaagttattaatagttaataatattattatattgaattttaaaatttgtgttttgggtattagtgaaggtgtgtggtgggtgatgatgtttattaagtgattaagaatagagttagagtatagaaatatttattattttaataagttgttgtgaggtgattttgtggatagtgttaattgtggggttattagtgtagttgtatgtataaattaaataagggttgttagttgttttgtaattatatttataatatatttaaaaggtgatgtaaatatattaaaatgtttaagatataggttgttaaaatataaataattgtatgaataagtgttatttatatggtattggatatgtatagatggaaaatataaaaatgttattgtaattttaatatatataagtatattataaagagatgattttttaaatattgtaaaaatatttaatatagtattagtgttaataggatatatgattatttagtttaatgattgaattaaatatttttatagtaagtattgtgttatgttttttgttttgtttttgtgtgttattatttgtgtgttttgttatatgtttatttgtgttgtttgtgttggtatatgtaatattattattattaattgtgattttatgggttattgtaatttttttattatgttgtttttgtatatatgttgtgtttatatatattttattatttgtaatttatatatatgtattttttttaagttaatagtaatttttttatttgtgtatattgttgtttgtattggtattggtattggtattggtattggtattggtataataaatttttttattttttttttattattattatgtggtttaaatgttttataaaatgtattaaatgtgtgtttgttatataattatattaaatatgtaaagtagtaggtatttgtttattagatgttatatttaaaatagaatatattattattgtagattaaatattaaggtatggtagtatgggtgttttttttggtgggttgggtattgggtttggttttggtattgggggttgtattggatatgttttttttagtatatgtttttttatagtatttgaggtaagtatatttattagattattagttagtattgattttgtaggttttttggatttttttatagtaagttttgttgaagaatttggaattgttgatgttggtgtttttgtttttatattatatttttttataatatttgggtttgatattgttataattgtagatataatatttgtaattttagatgtaataagtgttagtatatatgaaaattttatttttattgatttatttgtattgtagttttttatatttgtagaaatattaggttatttattatttttattattatttattagtatatataattatgaggaaatatttatggatatatttattgtttttattaataatgaaaatataataagtagtatatttattttaggggtgtgttgttttgtatgtttagggttatatagtaaggttatataataagtaaaagttattgatttaatgttttttagtgttttaaaatagttaattatatatgaaaattttgtttatgaaattgtaaatgttgaagaatttttatatttttttaatatattgtataatatagtttttgattttgattttttagatattatagtattatataggtttgtttttattttatgtaggaatattgttagatatagtagattaggtaataaataaattttgtgtatttgtagtggtgttattattggtgtaagggtgtattattattatgatattagtagtattaattttgtaggtgaaagtattgaaatgtaatttttaggggtgtttgtaattattatttttattttaaatgatggtttatatgatatttatgtagatattgattttattgtggatatatttgttatatataatgtttttttttttattgttgtatagtttatatttgttgtgtttgtttatgtatttataaatattattgtgttattaagtataggttttgatatttttatattttttgggtttgatgtatttatagagtatgtatttatataggtttttttattttttttggtttttataatgttataagtgtttatttttgttgatgggggtgatttttatttgtattttagttattatatgttaaaatgttgatgtaaatgtgtattatatttttttatagatgtttttgtggtggtttagtgaggttattgtttatttattatttgttttagtgtttaaagttgtaagtatggatgaatatgtaatatgaattaatatatattattatgtaggtagtgttaggttgtttatagtaggttatttatattattttatatttaaatttgataattttaaaaaaatagttgtattaaaggtgttaggattataatatagggtatttagggtttgtttattagatttaaataaatttggattttttgatatatttttttataattttgaaatttaatgtttagtttgggtttgtgttggtttagaggtaggttgtgggtagttattaggtgtaggtattagtggttatttattattaaataaatttgatgatattgaaaattttaatagatatgttggtggttttggtattgataatagggaatgtatattaatggattataaataaatataattgtgtttatttggttgtaaattatttattggagagtattggggtaaaggtagtttttgtagtaataatgttattatttttggtgattgttttttattagaattaaaaaatttagttatataagatggggatatggttgatataggttttggagttatggattttattgttttataagatattaaaagtaatgtttttttggatatttgtaattttatttgtaaatatttagattattttaaaatggttgttgagttatatggtgatatattatttttttatttatgtagggaataaatgtttgtaaggtatttttttaatagattaggtatggttggtgaattggtttttattgatttatatattaaaggttttggtttaatagttattttagttaatagtatatatttttttatatttagtggttttatggttattttagatgtataaatttttaataaattatattggatgtaatgtgtttagggatataataatggtatttgttggggtaattagttatttgttattgtggtagatattatatgtagtattaatatgtttgtttgtgttgtaattgtaaatagtgatattatatttaaaagtagtaattttaaagagtatttaagatatggtgaggaatttgatttataatttatattttagttatgtaaaataatattatttgtagatataatgatatatatttatagtatgaattttgttattttggaagattggaattttggattgattatattttttttaggttttttggaggatatttataggtttgttattttataggttattatatgttaaaaaattgttttttaaaagtttaaggaagatttatttaaagattatgtattttgggaggttaatttaaaagaaaagttttttgtagatttagattagtttttattgggttgtaaatttttattataggtaggatatagggtatgttttaaatttaaagtaggtaaatgtagtgtatttttagtatttattattatattagtaaaatgtaaaaaaattaaaaagtaatggatgtgtatgtaatatatgtgtttgtatgtgtatgtgtttgtgttgtattgtatatgtgtgtgtttgtgtgttatatatggtatatgtatgtttatgtatgtgtgtgtatttgtatatatgtatagtatgttatgtgtgtatgtatgttatgtatgttaataaatatgtgtatatttgtgtgtgttgtgtatgttgtttttatatatattttattagtaatatattattattattttataaattattgtttttatttgtttttatttgtttttgttttttttaatagttatgtatttatttttgtttataatttaggtgttatgttatagtaaaagttgtatatttggtttgttttttgtaattaaagttattttattttgattttatgtagttattttaaatttttaattgtttttggttgtattgtttaaatatgttagtataattatgttgatgtagtagttttgtggtttttggttttttgaatattagtttttgttaatattttggtttgtagttttttgtttaatatattttgttaatatataatttagtttaattttgtaattatattatgaattatgtttgtttaaatataattgtagtttaattatgtgttatgtatatatattatattattttatatattttaaattgtttttaggtatatattttgtagattatttatatttttgattgtagtgttggtttttgtatatgtttaaattgttaaggttgtgttatgtattataaataagttgtatgttatttatataattaattgtatataggtattatattgtttttggttatagttttataagtaattgttttttttatatt

SEQ ID NO: 628 - DNA, 7912 bp, Papilloma virus
attattattattagaatcatattttttcatccctcactggctttcaccacttggcttttgccaaccatatatttcgtgtatcataaaacacgtttggatgtctgcggtacaagtttttaggacgtctttctggagcctttaacgtacttgattcgagccgtaacctttatgggatgctacttgattctaacttaacacagatgacgtttccagtcaattgtctttgtctccataatctaaaacgtaaatgtctaaattgttatcatatatccctgctgtgtggtgtgcctcacacatgttttacaaattctaaaataagttttcattcacttaaatctaccatatctatatcacacataccttgttgtaatctttttaactgtttgtttccatatacactaaacaattaatccacatattgcacagtttctggcaacacaggtcttctttttgtttctgtaaacctatttttctttgctaaggtgttgtatcctccttccacctgtcctgcaacgtatcgtacaacctcttctggagcatgactttgggttcacatttgtacgcacctctttgtggatgcaacgttctgatacacaatctaaacgttggactccgttgactggaggtgacaatactcgttaatgggctgtcgagtctactcctcctacagtatctgtcaggtcgacctgttcgtcttggcctgtgtaggttaatgttatagcaatggaaaacaacagtcacattcagatgtgaagcaaacacacatgtctcgtgtgttcatctataagcgtataacgttctcgacaattacccgagtaaaccttagcacacggggttgacaagatgatctgacattgatgttaccgactaggtcgtccatgtctacccctcccctgccctacgttaccaaccaaaatacatcttcgtcattaactgtctgtctgtcccctgttgtaaagtctcctgcttttacttctgtcatcactatgacccctcctataccaactgaaataactgttaacattacatatgttgttagtccgtcttcgtctctgtcgtgtccgtaacaaagtacgtgtccttcgcctccttgtacgtctccgacacgtccaagattttgctttcatacatccatcaggaaattcactataatcatcaacacacctaatattataatcaggtgccaattttcgatatacgtatcttttattgtcattttgtcgttttgcttctgagaaacttgaaggtctgtcgcccataccgttatgacttcacctttgcgtcgtctaccatgtccatctcctcgttgtttgttgtaattcaacattaccatcactgccctgtgtatcacttgctctcttactttgaggttgtgcattatataacgttcacaatttttgatcgttaccatttcgacgatacaatccatttaaatttcttaatataccacattcaaaataccttgattaatccggtaaagtttcgttattttcgtgtacatgactaaccacacatcgacgcaaacctcaatgtccatgtcaacgtcttcctaaattttgggataacgttggtataacaaacataacggtaaatgtttcaaatcgtacaaggaccccgtaccaatacaattacgaacactctaaatttacacgttttttatcttattgttaactttttaataatctttttaataacacatatagatgtttaacatacaattaagtcggtgggtttaatgcatcgtgtcgacgtcgtaatataaccatgtcttgtccttacagtttgtaatcgctacatataccactttgtggtcttacctatctttctgtttgtcataatgtcgtatcaaaattactgtgttgtaaactaaacagggtttaccatgttacccgtatactgttactacaatacctactatcactttaacggatatttatacgtgttaatcgactgtcactatcattacgtacacgtaaaaatttttcattaagcgtccgtttttatcaatttctaacaccttgttacacatctgtaatatttgctcgtctttttgctgtttacaggtaccctgtcacctaattttcatctacactgtttcaatcactgcttccactgacctccctgtatcatttcaaaaattctatagttgtttatcttaaacacagtaaaaatagacgtaatttcgacaaaaattttcctcacggtttctttttgacataaaattatgtaccacgtggattatgtccatttagtataaaaccttactcggaataatcgaaaaatgttcctacatattatagtatacgtttaagtttttcagtaaaaaccaatgttggtgaccgactacgattttatccgtacaatctactacgatgttgcggtacaaccgtaatatatctgttaatggatgctttacgtgatctaccgttgggacatagatatctacatttcgtatttcgaaattacgtcaattttacaggaggaaataactaatgtagattatatttacgtccattcctactgtctaccggtatggatgtatcgtctgaccaccaaaaatgtaaaggtttaggtaaaggtaaactgtttttgcctttaggtcatatacttaattcactatttttgacctttaggaaaaagagttcctgcaccacgtctaatttaaacgtgctccttctcctgtttcttttgctacctctgagaaagagttgcaaatttacacacagtcctgttttataatcttgtaatacttttactatcatttgctgaaacactagtatatctgataacctttgtataagctgaacttacacataattacatatttcgttctctttacccttatgtgtcataattggtggtccaccacggtcgcaacagtcatagtttccggtttcggaatgttcgataacttgatgtttactacaacctttgtaatttattgtgacttatgtttttactcctgacctgttacgtcgtttgttcagaacttgacataaattgacgtggatgtcccacaaatttttttgtacctatatgacatctccacgttaaactaccactacatgtgttgtggtacgtaatatgattgacctttaaatatatggatacatatctaccggttacatgacaacaccttcccgttcaattaacattcccgtaaataatacatgtacttcctgtatattgtataaaacatttaaaatgtcttctccgtttttttataccctgaccattttttacccttcacgtacgcccaccagtccattaacaaaaaggacttagacataaatcgtcactgctttataggaaacgaccctaacaatgtttcgatggttgtcggttgttgtggtggtgtagcttaaggttttggacgcggaacccgtggtcacttccacacgccgcccgctgctgcagatgattcgctggttcttgtctcggtctcgtgtctttgtgggtggtggggttgttcaacaacgctccgctgaggcacctgtcacagttgacaccccaatagtcacgtcgacgtacgtgtttggtttgttcccgacagtcaacaggacgttgatgtggatattatgtgaattttccactacgtttatataattttacaaattctatatccgacagttttatatttgttaacatacttgttcacagtagatgtaccgtaacctgtacatgtctaccttttgtatttttacgataacattggaattgtatatattcatgtagtgtttctctgctaaaaaatttatgacatttttatggattgtgtcatagtcacagttgtcctatatactgataaatcggattactaacttgatttataaagatgtcattcgtaacacgatacgaaaaacgaaacgaaaacacacgatgataaacacacagaacagtatgcaggtgaacacgacagacacagccatatacgttgtgatgataataattaacactaaaatacccaataacgttggagaggtaatgcaacaaaaacatatatacaacacaaatatatataaggtaataaacattaagtatgtgtacgtagaaaaaattcagttgtcattgaaaaaatgaacacatatgacaacaaacataaccataaccataaccataaccataaccataaccatattatttgaaaaaatgaaaaaaaaataataatggtacgccaggtttgcgagatgttttgcgtgatttgcacgcagacgatgtgttaatatagtttgtacatttcgtcgtccatgaacaggtagtctgcaatatggattttatcttgtatgatggtaacgtctggtttataattccataccatcatacccacaaaaaaaaccacccaacccataacccaggccgagaccatgacccccagcgtgacctatacagggagaatcatgtgcaggaagatgtcatagactccgttcatatggataatctggtggtcaatcgtaactgggacatccagggaacctggggagatatcattcagaacaacttcttagaccttaacaactacaaccacggggacgaggatatggtgtgggaggatgttgtagacccaaactgtaacgatgttgacgtctgtgttgtggacgttaaaatctacattgttcacaatcgtgtgtacttttaggatgaaaatgactaggtagacataacgtcggaggatgtggacgtctttgtagtccagtaaatgatgaaagtagtagtagataatcgtgtgtattaatactcctttatggatacctatgtaaataacaaagatgattattacttttgtattgttcatcgtgtgggtaaggtccccacgcggcaggacgtgcaaatcccaatatatcattccgatgtgttgttcattttcaataactaggttgcaaagaatcacgaggttttgtcgattaatgtatacttttgggacggatactttgacatttacgacttcttagaaatatgaaaaggttatgtagcgtattatatcggggactagggctgaaagatctataatatcgtaatgtatccggacgggaatggagtgcatccttgtgacaatctatatcatctgatccattatttgtttgaaacgcgtgagcatcaccacgatgataaccacgttcccacgtaataataatactataatcatcataattaggacgtccactttcataactttacgttggaaatccccgcagacgttgatgatgaagatgaaatttactaccgaatatactgtaaatacgtctgtgactaaaatgacacctatgtggacggtgtgtattacaaaggggaagatgacgacatgtcaggtgtagacgacacagacggatacatggatgtttatggtgacacggtgattcatgtccaaaactgtaagggtataaaagacccggactacatggatatctcgtacgtggatgtgtccaaaagggtaaaggaaaccggggatgttgcggtgttcacagataaaaacaactacccccactaaaaataaacgtgggatcaataatatacaattttgcagctgcatttgcacatagtataaaaaaatgtctacagagacaccgccggatcgctccgatgacagatgaatggtggacagggtcacagatttcaacattcgtgcctacttatacattgtgcttggttgtatataatagtgcgtccgtcacgatccgacgaatgtcatccggtaggtataataaggtatggatttagactgttaggatttttttatcaacatggtttccacagtcctaatgttatatcccataaatcccaagcaaatggtctaggtttgtttaaacctaaaggactatgtagaaaaatattaggactttgagttgcgaatcaaacccggacacaaccaaatctccatccagcgcccgtcggtaatccacatccataatcaccagtaggtaataatttatttaaactactgtgacttttgagattatctatacggccaccaggaccgtgactattatcccttacatatagttacctaatatttgtttgtgttgacacaaatgaaccaacgtttggtggataacctctcgtaaccccatttccatcaggaacatcattgttacgataatggggaccactaacaggaggtaatcttaattttttaagtcaatatgttctacccctataccaactatgtccgaaacctcgatacctaaaatgacgaaatgttctgtgattttcattacaaggaaacctgtaaacattaagataaacatttataggtctaatagaattttaccaacgactcggtataccgctatgtaataaaaaaataaatgcatcccttgtttacaaacattccgtaaaaaaattatctagtccgtgccaaccacttagccagggatgactgaatatataatttccgaggccaagttgtcgatgaaatcgattgtcatgtatgaaaggatgtggatcgccgaggtaccaatgaagtctacgtgtttaaaaattatttggtataacctacgttgcacgagtccctgtgttattaccataaacaaccccgttagtcaataaacaatgacaccatctatggtgtgcatcatggttatacagacaaacacgacgttaacgtttgtcactatgatgtaaattttcatcattaaaatttctcataaattctgtaccactccttaaactaaatgttaaatataaagtcaatacgttttattgtaatagacgtctgtattactgtatataagtgtcatacttaggacgataaaaccttctaaccttaaaacctaactggtgtggagggagtccaagaaacctcctatggatatccaaacagtggagtgtccggtaatgtacagttttttgacggggggttttcgggttccttctaggtaaatttctaatacataaaaccctccaattaaattttcttttcaaaagacgtctaaatctagtcaaaggtgacccagcgtttaaaaataatgtccgtcctatatcccgtgcaggatttaaatttcgtccatttgcatcacgtgggagtcgtagatggtgatgtggtcgttttgcatttttttgatttttcattacctacacatacattatgtacacagacatacacatacacgaacacgacataacatatacacacacaaacacacaatatataccatatacatacaaatacatacgcacacatgaacatatatacatatcatacaatacacacatacatacgatacatacaattatttatacacatatggacacacacaacacatacaacaggaatatatgtgggataatcattgtatgataatgataaaatatttgataacaaggatgaacaaggatgaacaaggacgaggagggttatcagtacatgaataaagacggatattaaatccacagtgcggtatcattttcaacatgtgggccaggcaaaaaacgttgatttcgatgaggtaaaactaaaatacgtcggtaaaatttagggattggcaaaagccaacgtaacaaatttgtacgatcatgttgatacgactacgtcatcaagacgccaaaaaccaaaggacttatgatcaaaaacggttgtaagaccgaacatcaaaggacggattgtgtggaacggttgtatattaggtcaggttgaaacgttaatatgatacttagtacaaacaaatttatgttgacatcaagttgatacacagtacgtgtatataatataataggatgtgtggaatttgacgaaaatccgtgtataaaacatctaatagatataggaactaacgtcacgaccgaaaacgtgtacaaatttgacggttccaacacagtacgtaatatttattcaacatacaatgagtatattaattaacgtatatccataatgtggcaaaagccaatgtcaaaatgttcgttaacaagaaaaatatga

SEQ ID NO: 629 - DNA, 7912 bp, Papilloma virus
attattattattagaatuatattttttuatuuutuautggutttuauuauttgguttttguuaauuatatatttugtgtatuataaaauaugtttggatgtutguggtauaagtttttaggaugtutttutggaguutttaaugtauttgattugaguugtaauutttatgggatgutauttgattutaauttaauauagatgaugtttuuagtuaattgtutttgtutuuataatutaaaaugtaaatgtutaaattgttatuatatatuuutgutgtgtggtgtguutuauauatgttttauaaattutaaaataagttttuattuauttaaatutauuatatutatatuauauatauuttgttgtaatutttttaautgtttgtttuuatatauautaaauaattaatuuauatattguauagtttutgguaauauaggtuttutttttgtttutgtaaauutatttttutttgutaaggtgttgtatuutuuttuuauutgtuutguaaugtatugtauaauututtutggaguatgautttgggttuauatttgtauguauututttgtggatguaaugttutgatauauaatutaaaugttggautuugttgautggaggtgauaatautugttaatgggutgtugagtutautuutuutauagtatutgtuaggtugauutgttugtuttgguutgtgtaggttaatgttataguaatggaaaauaauagtuauattuagatgtgaaguaaauauauatgtutugtgtgttuatutataagugtataaugttutugauaattauuugagtaaauuttaguauauggggttgauaagatgatutgauattgatgttauugautaggtugtuuatgtutauuuutuuuutguuutaugttauuaauuaaaatauatuttugtuattaautgtutgtutgtuuuutgttgtaaagtutuutguttttauttutgtuatuautatgauuuutuutatauuaautgaaataautgttaauattauatatgttgttagtuugtuttugtututgtugtgtuugtaauaaagtaugtgtuuttuguutuuttgtaugtutuugauaugtuuaagattttgutttuatauatuuatuaggaaattuautataatuatuaauauauutaatattataatuaggtguuaattttugatataugtatuttttattgtuattttgtugttttguttutgagaaauttgaaggtutgtuguuuatauugttatgauttuauutttgugtugtutauuatgtuuatutuutugttgtttgttgtaattuaauattauuatuautguuutgtgtatuauttgutututtautttgaggttgtguattatataaugttuauaatttttgatugttauuatttugaugatauaatuuatttaaatttuttaatatauuauattuaaaatauuttgattaatuuggtaaagtttugttattttugtgtauatgautaauuauauatugauguaaauutuaatgtuuatgtuaaugtuttuutaaattttgggataaugttggtataauaaauataauggtaaatgtttuaaatugtauaaggauuuugtauuaatauaattaugaauaututaaatttauaugttttttatuttattgttaautttttaataatutttttaataauauatatagatgtttaauatauaattaagtuggtgggtttaatguatugtgtugaugtugtaatataauuatgtuttgtuuttauagtttgtaatugutauatatauuautttgtggtuttauutatutttutgtttgtuataatgtugtatuaaaattautgtgttgtaaautaaauagggtttauuatgttauuugtatautgttautauaatauutautatuautttaauggatatttataugtgttaatugautgtuautatuattaugtauaugtaaaaatttttuattaagugtuugtttttatuaatttutaauauuttgttauauatutgtaatatttgutugtutttttgutgtttauaggtauuutgtuauutaattttuatutauautgtttuaatuautguttuuautgauutuuutgtatuatttuaaaaattutatagttgtttatuttaaauauagtaaaaatagaugtaatttugauaaaaattttuutuauggtttutttttgauataaaattatgtauuaugtggattatgtuuatttagtataaaauuttautuggaataatugaaaaatgttuutauatattatagtataugtttaagtttttuagtaaaaauuaatgttggtgauugautaugattttatuugtauaatutautaugatgttguggtauaauugtaatatatutgttaatggatgutttaugtgatutauugttgggauatagatatutauatttugtatttugaaattaugtuaattttauaggaggaaataautaatgtagattatatttaugtuuattuutautgtutauuggtatggatgtatugtutgauuauuaaaaatgtaaaggtttaggtaaaggtaaautgtttttguutttaggtuatatauttaattuautatttttgauutttaggaaaaagagttuutguauuaugtutaatttaaaugtgutuuttutuutgtttuttttgutauututgagaaagagttguaaatttauauauagtuutgttttataatuttgtaatauttttautatuatttgutgaaauautagtatatutgataauutttgtataagutgaauttauauataattauatatttugttututttauuuttatgtgtuataattggtggtuuauuauggtuguaauagtuatagtttuuggtttuggaatgttugataauttgatgtttautauaauutttgtaatttattgtgauttatgtttttautuutgauutgttaugtugtttgttuagaauttgauataaattgaugtggatgtuuuauaaatttttttgtauutatatgauatutuuaugttaaautauuautauatgtgttgtggtaugtaatatgattgauutttaaatatatggatauatatutauuggttauatgauaauauuttuuugttuaattaauattuuugtaaataatauatgtauttuutgtatattgtataaaauatttaaaatgtuttutuugtttttttatauuutgauuattttttauuuttuaugtauguuuauuagtuuattaauaaaaaggauttagauataaatugtuautgutttataggaaaugauuutaauaatgtttugatggttgtuggttgttgtggtggtgtaguttaaggttttggauguggaauuugtggtuauttuuauauguuguuugutgutguagatgattugutggttuttgtutuggtutugtgtutttgtgggtggtggggttgttuaauaaugutuugutgagguauutgtuauagttgauauuuuaatagtuaugtugaugtaugtgtttggtttgttuuugauagtuaauaggaugttgatgtggatattatgtgaattttuuautaugtttatataattttauaaattutatatuugauagttttatatttgttaauatauttgttuauagtagatgtauugtaauutgtauatgtutauuttttgtatttttaugataauattggaattgtatatattuatgtagtgtttututgutaaaaaatttatgauatttttatggattgtgtuatagtuauagttgtuutatatautgataaatuggattautaauttgatttataaagatgtuattugtaauaugataugaaaaaugaaaugaaaauauaugatgataaauauauagaauagtatguaggtgaauaugauagauauaguuatataugttgtgatgataataattaauautaaaatauuuaataaugttggagaggtaatguaauaaaaauatatatauaauauaaatatatataaggtaataaauattaagtatgtgtaugtagaaaaaattuagttgtuattgaaaaaatgaauauatatgauaauaaauataauuataauuataauuataauuataauuataauuatattatttgaaaaaatgaaaaaaaaataataatggtauguuaggtttgugagatgttttgugtgatttguauguagaugatgtgttaatatagtttgtauatttugtugtuuatgaauaggtagtutguaatatggattttatuttgtatgatggtaaugtutggtttataattuuatauuatuatauuuauaaaaaaaauuauuuaauuuataauuuagguugagauuatgauuuuuagugtgauutatauagggagaatuatgtguaggaagatgtuatagautuugttuatatggataatutggtggtuaatugtaautgggauatuuagggaauutggggagatatuattuagaauaauttuttagauuttaauaautauaauuauggggaugaggatatggtgtgggaggatgttgtagauuuaaautgtaaugatgttgaugtutgtgttgtggaugttaaaatutauattgttuauaatugtgtgtauttttaggatgaaaatgautaggtagauataaugtuggaggatgtggaugtutttgtagtuuagtaaatgatgaaagtagtagtagataatugtgtgtattaatautuutttatggatauutatgtaaataauaaagatgattattauttttgtattgttuatugtgtgggtaaggtuuuuaugugguaggaugtguaaatuuuaatatatuattuugatgtgttgttuattttuaataautaggttguaaagaatuaugaggttttgtugattaatgtatauttttgggauggatautttgauatttaugauttuttagaaatatgaaaaggttatgtagugtattatatuggggautagggutgaaagatutataatatugtaatgtatuuggaugggaatggagtguatuuttgtgauaatutatatuatutgatuuattatttgtttgaaaugugtgaguatuauuaugatgataauuaugttuuuaugtaataataatautataatuatuataattaggaugtuuautttuataautttaugttggaaatuuuuguagaugttgatgatgaagatgaaatttautauugaatatautgtaaataugtutgtgautaaaatgauauutatgtggauggtgtgtattauaaaggggaagatgaugauatgtuaggtgtagaugauauagauggatauatggatgtttatggtgauauggtgattuatgtuuaaaautgtaagggtataaaagauuuggautauatggatatutugtaugtggatgtgtuuaaaagggtaaaggaaauuggggatgttguggtgttuauagataaaaauaautauuuuuautaaaaataaaugtgggatuaataatatauaattttguagutguatttguauatagtataaaaaaatgtutauagagauauuguuggatugutuugatgauagatgaatggtggauagggtuauagatttuaauattugtguutauttatauattgtguttggttgtatataatagtgugtuugtuaugatuugaugaatgtuatuuggtaggtataataaggtatggatttagautgttaggatttttttatuaauatggtttuuauagtuutaatgttatatuuuataaatuuuaaguaaatggtutaggtttgtttaaauutaaaggautatgtagaaaaatattaggautttgagttgugaatuaaauuuggauauaauuaaatutuuatuuaguguuugtuggtaatuuauatuuataatuauuagtaggtaataatttatttaaautautgtgauttttgagattatutataugguuauuaggauugtgautattatuuuttauatatagttauutaatatttgtttgtgttgauauaaatgaauuaaugtttggtggataauututugtaauuuuatttuuatuaggaauatuattgttaugataatggggauuautaauaggaggtaatuttaattttttaagtuaatatgttutauuuutatauuaautatgtuugaaauutugatauutaaaatgaugaaatgttutgtgattttuattauaaggaaauutgtaaauattaagataaauatttataggtutaatagaattttauuaaugautuggtatauugutatgtaataaaaaaataaatguatuuuttgtttauaaauattuugtaaaaaaattatutagtuugtguuaauuauttaguuagggatgautgaatatataatttuugagguuaagttgtugatgaaatugattgtuatgtatgaaaggatgtggatuguugaggtauuaatgaagtutaugtgtttaaaaattatttggtataauutaugttguaugagtuuutgtgttattauuataaauaauuuugttagtuaataaauaatgauauuatutatggtgtguatuatggttatauagauaaauaugaugttaaugtttgtuautatgatgtaaattttuatuattaaaatttutuataaattutgtauuautuuttaaautaaatgttaaatataaagtuaataugttttattgtaatagaugtutgtattautgtatataagtgtuatauttaggaugataaaauuttutaauuttaaaauutaautggtgtggagggagtuuaagaaauutuutatggatatuuaaauagtggagtgtuuggtaatgtauagttttttgauggggggttttugggttuuttutaggtaaatttutaatauataaaauuutuuaattaaattttuttttuaaaagaugtutaaatutagtuaaaggtgauuuagugtttaaaaataatgtuugtuutatatuuugtguaggatttaaatttugtuuatttguatuaugtgggagtugtagatggtgatgtggtugttttguatttttttgatttttuattauutauauatauattatgtauauagauatauauatauaugaauaugauataauatatauauauauaaauauauaatatatauuatatauatauaaatauatauguauauatgaauatatatauatatuatauaatauauauatauataugatauatauaattatttatauauatatggauauauauaauauatauaauaggaatatatgtgggataatuattgtatgataatgataaaatatttgataauaaggatgaauaaggatgaauaaggaugaggagggttatuagtauatgaataaagauggatattaaatuuauagtguggtatuattttuaauatgtggguuagguaaaaaaugttgatttugatgaggtaaaautaaaataugtuggtaaaatttagggattgguaaaaguuaaugtaauaaatttgtaugatuatgttgataugautaugtuatuaagauguuaaaaauuaaaggauttatgatuaaaaauggttgtaagauugaauatuaaaggauggattgtgtggaauggttgtatattaggtuaggttgaaaugttaatatgatauttagtauaaauaaatttatgttgauatuaagttgatauauagtaugtgtatataatataataggatgtgtggaatttgaugaaaatuugtgtataaaauatutaatagatataggaautaaugtuaugauugaaaaugtgtauaaatttgauggttuuaauauagtaugtaatatttattuaauatauaatgagtatattaattaaugtatatuuataatgtgguaaaaguuaatgtuaaaatgttugttaauaagaaaaatatga

SEQ ID NO: 630 - DNA, 7912 bp, Papilloma virus
attattattattagaattatatttttttattttttattggtttttattatttggtttttgttaattatatattttgtgtattataaaatatgtttggatgtttgtggtataagtttttaggatgtttttttggagtttttaatgtatttgatttgagttgtaatttttatgggatgttatttgattttaatttaatatagatgatgtttttagttaattgtttttgtttttataatttaaaatgtaaatgtttaaattgttattatatatttttgttgtgtggtgtgttttatatatgttttataaattttaaaataagtttttatttatttaaatttattatatttatattatatatattttgttgtaatttttttaattgtttgtttttatatatattaaataattaatttatatattgtatagtttttggtaatataggttttttttttgtttttgtaaatttatttttttttgttaaggtgttgtattttttttttatttgttttgtaatgtattgtataattttttttggagtatgattttgggtttatatttgtatgtatttttttgtggatgtaatgttttgatatataatttaaatgttggattttgttgattggaggtgataatatttgttaatgggttgttgagtttattttttttatagtatttgttaggttgatttgtttgttttggtttgtgtaggttaatgttatagtaatggaaaataatagttatatttagatgtgaagtaaatatatatgttttgtgtgtttatttataagtgtataatgtttttgataattatttgagtaaattttagtatatggggttgataagatgatttgatattgatgttattgattaggttgtttatgtttattttttttttgttttatgttattaattaaaatatatttttgttattaattgtttgtttgttttttgttgtaaagttttttgtttttatttttgttattattatgattttttttatattaattgaaataattgttaatattatatatgttgttagtttgtttttgtttttgttgtgtttgtaataaagtatgtgttttttgtttttttgtatgtttttgatatgtttaagattttgtttttatatatttattaggaaatttattataattattaatatatttaatattataattaggtgttaatttttgatatatgtattttttattgttattttgttgttttgtttttgagaaatttgaaggtttgttgtttatattgttatgattttatttttgtgttgtttattatgtttatttttttgttgtttgttgtaatttaatattattattattgttttgtgtattatttgtttttttattttgaggttgtgtattatataatgtttataatttttgattgttattattttgatgatataatttatttaaattttttaatatattatatttaaaatattttgattaatttggtaaagttttgttatttttgtgtatatgattaattatatattgatgtaaattttaatgtttatgttaatgtttttttaaattttgggataatgttggtataataaatataatggtaaatgttttaaattgtataaggattttgtattaatataattatgaatattttaaatttatatgttttttattttattgttaattttttaataatttttttaataatatatatagatgtttaatatataattaagttggtgggtttaatgtattgtgttgatgttgtaatataattatgttttgtttttatagtttgtaattgttatatatattattttgtggttttatttatttttttgtttgttataatgttgtattaaaattattgtgttgtaaattaaatagggtttattatgttatttgtatattgttattataatatttattattattttaatggatatttatatgtgttaattgattgttattattattatgtatatgtaaaaattttttattaagtgtttgtttttattaatttttaatattttgttatatatttgtaatatttgtttgtttttttgttgtttataggtattttgttatttaatttttatttatattgttttaattattgtttttattgatttttttgtattattttaaaaattttatagttgtttattttaaatatagtaaaaatagatgtaattttgataaaaattttttttatggtttttttttgatataaaattatgtattatgtggattatgtttatttagtataaaattttatttggaataattgaaaaatgtttttatatattatagtatatgtttaagttttttagtaaaaattaatgttggtgattgattatgattttatttgtataatttattatgatgttgtggtataattgtaatatatttgttaatggatgttttatgtgatttattgttgggatatagatatttatattttgtattttgaaattatgttaattttataggaggaaataattaatgtagattatatttatgtttatttttattgtttattggtatggatgtattgtttgattattaaaaatgtaaaggtttaggtaaaggtaaattgtttttgtttttaggttatatatttaatttattatttttgatttttaggaaaaagagtttttgtattatgtttaatttaaatgtgtttttttttttgttttttttgttatttttgagaaagagttgtaaatttatatatagttttgttttataattttgtaatatttttattattatttgttgaaatattagtatatttgataatttttgtataagttgaatttatatataattatatattttgttttttttatttttatgtgttataattggtggtttattatggttgtaatagttatagtttttggttttggaatgtttgataatttgatgtttattataatttttgtaatttattgtgatttatgtttttatttttgatttgttatgttgtttgtttagaatttgatataaattgatgtggatgttttataaatttttttgtatttatatgatatttttatgttaaattattattatatgtgttgtggtatgtaatatgattgatttttaaatatatggatatatatttattggttatatgataatatttttttgtttaattaatatttttgtaaataatatatgtattttttgtatattgtataaaatatttaaaatgttttttttgtttttttatattttgattattttttattttttatgtatgtttattagtttattaataaaaaggatttagatataaattgttattgttttataggaaatgattttaataatgttttgatggttgttggttgttgtggtggtgtagtttaaggttttggatgtggaatttgtggttatttttatatgttgtttgttgttgtagatgatttgttggtttttgttttggttttgtgtttttgtgggtggtggggttgtttaataatgttttgttgaggtatttgttatagttgatattttaatagttatgttgatgtatgtgtttggtttgtttttgatagttaataggatgttgatgtggatattatgtgaattttttattatgtttatataattttataaattttatatttgatagttttatatttgttaatatatttgtttatagtagatgtattgtaatttgtatatgtttattttttgtatttttatgataatattggaattgtatatatttatgtagtgtttttttgttaaaaaatttatgatatttttatggattgtgttatagttatagttgttttatatattgataaattggattattaatttgatttataaagatgttatttgtaatatgatatgaaaaatgaaatgaaaatatatgatgataaatatatagaatagtatgtaggtgaatatgatagatatagttatatatgttgtgatgataataattaatattaaaatatttaataatgttggagaggtaatgtaataaaaatatatatataatataaatatatataaggtaataaatattaagtatgtgtatgtagaaaaaatttagttgttattgaaaaaatgaatatatatgataataaatataattataattataattataattataattataattatattatttgaaaaaatgaaaaaaaaataataatggtatgttaggtttgtgagatgttttgtgtgatttgtatgtagatgatgtgttaatatagtttgtatattttgttgtttatgaataggtagtttgtaatatggattttattttgtatgatggtaatgtttggtttataattttatattattatatttataaaaaaaattatttaatttataatttaggttgagattatgatttttagtgtgatttatatagggagaattatgtgtaggaagatgttatagattttgtttatatggataatttggtggttaattgtaattgggatatttagggaatttggggagatattatttagaataattttttagattttaataattataattatggggatgaggatatggtgtgggaggatgttgtagatttaaattgtaatgatgttgatgtttgtgttgtggatgttaaaatttatattgtttataattgtgtgtatttttaggatgaaaatgattaggtagatataatgttggaggatgtggatgtttttgtagtttagtaaatgatgaaagtagtagtagataattgtgtgtattaatatttttttatggatatttatgtaaataataaagatgattattatttttgtattgtttattgtgtgggtaaggtttttatgtggtaggatgtgtaaattttaatatattattttgatgtgttgtttatttttaataattaggttgtaaagaattatgaggttttgttgattaatgtatatttttgggatggatattttgatatttatgattttttagaaatatgaaaaggttatgtagtgtattatattggggattagggttgaaagatttataatattgtaatgtatttggatgggaatggagtgtatttttgtgataatttatattatttgatttattatttgtttgaaatgtgtgagtattattatgatgataattatgtttttatgtaataataatattataattattataattaggatgtttatttttataattttatgttggaaatttttgtagatgttgatgatgaagatgaaatttattattgaatatattgtaaatatgtttgtgattaaaatgatatttatgtggatggtgtgtattataaaggggaagatgatgatatgttaggtgtagatgatatagatggatatatggatgtttatggtgatatggtgatttatgtttaaaattgtaagggtataaaagatttggattatatggatattttgtatgtggatgtgtttaaaagggtaaaggaaattggggatgttgtggtgtttatagataaaaataattatttttattaaaaataaatgtgggattaataatatataattttgtagttgtatttgtatatagtataaaaaaatgtttatagagatattgttggattgttttgatgatagatgaatggtggatagggttatagattttaatatttgtgtttatttatatattgtgtttggttgtatataatagtgtgtttgttatgatttgatgaatgttatttggtaggtataataaggtatggatttagattgttaggatttttttattaatatggtttttatagttttaatgttatattttataaattttaagtaaatggtttaggtttgtttaaatttaaaggattatgtagaaaaatattaggattttgagttgtgaattaaatttggatataattaaatttttatttagtgtttgttggtaatttatatttataattattagtaggtaataatttatttaaattattgtgatttttgagattatttatatggttattaggattgtgattattattttttatatatagttatttaatatttgtttgtgttgatataaatgaattaatgtttggtggataattttttgtaattttatttttattaggaatattattgttatgataatggggattattaataggaggtaattttaattttttaagttaatatgttttatttttatattaattatgtttgaaattttgatatttaaaatgatgaaatgttttgtgatttttattataaggaaatttgtaaatattaagataaatatttataggtttaatagaattttattaatgatttggtatattgttatgtaataaaaaaataaatgtattttttgtttataaatattttgtaaaaaaattatttagtttgtgttaattatttagttagggatgattgaatatataatttttgaggttaagttgttgatgaaattgattgttatgtatgaaaggatgtggattgttgaggtattaatgaagtttatgtgtttaaaaattatttggtataatttatgttgtatgagtttttgtgttattattataaataattttgttagttaataaataatgatattatttatggtgtgtattatggttatatagataaatatgatgttaatgtttgttattatgatgtaaatttttattattaaaattttttataaattttgtattattttttaaattaaatgttaaatataaagttaatatgttttattgtaatagatgtttgtattattgtatataagtgttatatttaggatgataaaattttttaattttaaaatttaattggtgtggagggagtttaagaaattttttatggatatttaaatagtggagtgtttggtaatgtatagttttttgatggggggtttttgggttttttttaggtaaatttttaatatataaaattttttaattaaattttttttttaaaagatgtttaaatttagttaaaggtgatttagtgtttaaaaataatgtttgttttatattttgtgtaggatttaaattttgtttatttgtattatgtgggagttgtagatggtgatgtggttgttttgtatttttttgattttttattatttatatatatattatgtatatagatatatatatatatgaatatgatataatatatatatatataaatatataatatatattatatatatataaatatatatgtatatatgaatatatatatatattatataatatatatatatatatgatatatataattatttatatatatatggatatatataatatatataataggaatatatgtgggataattattgtatgataatgataaaatatttgataataaggatgaataaggatgaataaggatgaggagggttattagtatatgaataaagatggatattaaatttatagtgtggtattatttttaatatgtgggttaggtaaaaaatgttgattttgatgaggtaaaattaaaatatgttggtaaaatttagggattggtaaaagttaatgtaataaatttgtatgattatgttgatatgattatgttattaagatgttaaaaattaaaggatttatgattaaaaatggttgtaagattgaatattaaaggatggattgtgtggaatggttgtatattaggttaggttgaaatgttaatatgatatttagtataaataaatttatgttgatattaagttgatatatagtatgtgtatataatataataggatgtgtggaatttgatgaaaatttgtgtataaaatatttaatagatataggaattaatgttatgattgaaaatgtgtataaatttgatggttttaatatagtatgtaatatttatttaatatataatgagtatattaattaatgtatatttataatgtggtaaaagttaatgttaaaatgtttgttaataagaaaaatatga

SEQ ID NO: 631 - DNA, 7909 bp, Papilloma virus
gtaaactataatgccaagttttaaaaaagtagggtgtaaccgaaagcggttcaaccgaaaacggtgcatatataaagcaaacattttgcagtaaggtactgcacgactatgtttcaagacactgaggaaaaaccacgaacattgcatgatttgtgccaagcattggagacaactatacacaacattgaactacagtgcgtggaatgcaaaaaacctttgcaacgatctgaggtatatgattttgcatttgcagatttaacagttgtatatagagagggaaatccatttggaatatgtaaactgtgtttgcggttcttatctaaaattagtgaatatagacattataattattctgtatatggaaatacattagaacaaacagttaaaaaacctttaaatgaaatattaattaggtgtattatatgtcaaagacctttgtgtcctcaagaaaaaaaacgacatgtggatttaaacaaacgatttcataatatttcgggtcgttgggcagggcgctgtgcggcgtgttggaggtcccgacgtagagaaactgcactgtgacgtgtaaaaacgccatgagaggacacaagccaacgttaaaggaatatgttttagatttatatcctgaaccaactgacctatactgctatgagcaattaagtgacagctcagatgaggatgaaggcttggaccggccagatggacaagcacaaccagccacagctgattactacattgtaacctgttgtcacacttgtaacaccacagttcgtttatgtgtcaacagtacagcaagtgacctacgaaccatacagcaactacttatgggcacagtgaatattgtgtgccctacctgtgcacaacaataaacatcatctacaatggccgatcctgaaggtacaaatggggctgggatggggtgtactggttggtttgaggtagaagcagtcatagagagaagaacaggagataatatttcagaagatgaggatgaaacagcagatgacagtggcacggatttactagagtttatagatgattctatggaaaatagtatacaggcagacacagaggcagcccgggcattgtttaatatacaggaaggggaggatgatttaaatgctgtgtgtgcactaaaacgaaagtttgccgcatgttcacaaagtgctgcggaggacgttgttgatcgtgctgcaaacccgtgtagaacgtctattaataaaaataaagaatgcacatacagaaaacgaaaaatagatgagctagaagacagcggatatggcaatactgaagtggaaactcagcagatggtacaacaggtagaaagtcaaaatggcgacacaaacttaaatgacttagaatctagtggggtgggggatgattcagaagtaagctgtgagacaaatgtagatagctgtgaaaatgttacgttgcaggaaattagtaatgttctacatagtagtaatacaaaagcaaatatattatataaatttaaagaggcctatggaataagttttatggaattagtaagaccatttaaaagtgataaaacaagctgtacagattggtgtataacaggatatggaattagtccatcagtagcagaaagtttaaaagtattaattaaacagcatagtttgtatactcatttacaatgtttaacttgcgatagaggaataataatattattgttaattagatttaggtgtagcaaaaacaggttaacagtagcaaaactaatgagtaatttattatcaatacctgaaacatgtatggttatagagccaccaaaattacggagccaaacatgtgcattgtattggtttagaacagcaatgtcaaacattagtgatgtacaaggtacaacacctgaatggatagatagactaactgttttacaacatagctttaatgataatatatttgatttaagtgaaatggtacagtgggcatatgataacgagttaacggacgatagtgacattgcatattattatgcacaacttgcagattcaaatagtaatgctgctgcatttttaaaaagtaactcacaagcaaaaatagtaaaggactgtggaataatgtgtagacattataaaaaagcagaaaaacgtaaaatgtcaataggacaatggatacaaagtagatgtgaaaaaacaaatgatggaggaaattggagaccaatagtacagttgttaagatatcaaaacattgaatttacagcatttttaggtgcatttaaaaagtttttaaaaggtataccaaaaaaaagctgtatgctaatttgtggaccagcaaatacaggaaagtcatattttggaatgagtttaatacagtttttaaaagggtgtgttatatcatgtgtaaattctaaaagtcacttttggttgcagccattatcagatgcaaaaataggaatgatagatgatgtaacgccaataagttggacatatatagatgattacatgagaaatgcgttagatggaaatgaaatttcaatagatgtgaaacatagggcattagtgcaattaaaatgtccaccactgcttcttacctcaaatacaaatgcaggcacagactctagatggccatatttacatagtagattaacagtatttgaatttaaaaatccattcccatttgatgaaaatggtaacccagtgtatgcaataaatgatgaaaattggaaatcctttttctcaaggacgtggtgcaaattagatttaatagaggaagaggacaaggaaaaccatggaggaaatatcagcacgtttaaatgcagtgcaggagaaaatactagatctttacgaagctgataaaactgatttaccatcacaaattgaacattggaaactgatacgcatggagtgtgctttattgtatacagccaaacaaatgggattttcacatttatgccaccaggtggtgccttctttgttagcatcaaagaccaaagcatttcaagtaattgaactacaaatggcattagagacattaagtaaatcacagtatagtacaagccaatggacattgcaacaaacaagcttagaggtgtggctttgtgaaccaccaaaatgttttaaaaaacaaggagaaacagtaactgtgcaatatgacaatgacaaaaaaaatacaatggattatacaaactggggtgaaatatatattatagaggaagatacatgtactatggttacagggaaagtagattatataggtatgtattatatacataactgtgaaaaggtatattttaaatattttaaagaggatgctgcaaagtattctaaaacacaaatgtgggaagtacatgtgggtggtcaggtaattgtttgtcctacgtctatatctagcaaccaaatatccactactgaaactgctgacatacagacagacaacgataaccgaccaccacaagcagcggccaaacgacgacgacctgcagacaccacagacaccgcccagccccttacaaagctgttctgtgcagaccccgccttggacaatagaacagcacgtactgcaactaactgcacaaacaagcagcggactgtgtgtagttctaacgttgcacctatagtgcatttaaaaggtgaatcaaatagtttaaaatgtttaagatacagattaaaaccttataaagagttgtatagttctatgtcatccacctggcattggaccagtgacaacaaaaatagtaaaaatggaattgtaactgtaacatttgtaactgaacagcaacaacaaatgtttttaggtaccgtaaaaataccacctactgtgcaaataagtactggatttatgacattataagtgtacatcacaagccaatatgtgctgctaattgtatataaccatgatatttgtttttgtattatgttttatattgtttttatgcttatccttattattacgtcctttaatactttccatttctacctatgcttggttgctggtgttggtattgctgctttgggtgtttgtgggatctcctttaaaaatttttttttgctatttgttgtttttatatttaccaatgatgtgtattaattttcatgcacagcatatgacacaacaagagtaatgtatatacatgtatatattgtttgtatatatgtgcacatggtggtgttttaacattgttgttgttattttagtttttttttttttgtattactaataaatacctttatattttagcagtgtattattatgagacacaaacgatctacaaggcgcaagcgtgcatctgcaacacaactataccaaacatgcaaggccacaggcacctgcccacccgatgttattcctaaagtggaaggaagtaccatagcagatcaaattcttaaatatggcagtttaggggttttttttggtggtttaggtattggcacaggctctggttcaggtggaaggactggctatgtacctattggtactgacccacctacagctgcaatccccttgcagcctatacgtcctccggttactgtagacactgttggacctttagactcgtctatagtgtcattaatagaagaaacaagttttatagaggcaggtgcaccagccccatctattcctacaccatcaggttttgatgttactacatctgcagatactacacctgcaattattaatgtttcatctgttggggagtcatctattcaaactatttctacacatttaaatcccacatttactgaaccatctgtactacaccctccagcgcctgcagaagcctctggacattttatattttcttcccctactgttagcacacaaagttatgaaaacataccaatggatacctttgttgtttccacagacagtagtaatgtaacatcaagcacgcccattccagggtctcgccctgtggcacgccttggtttatatagtcgcaatacccaacaggttaaggttgttgaccctgcttttttaacatcgcctcataaacttataacatatgataatcctgcatttgaaagctttgaccctgaagacacattacaatttcaacatagtgatatatcacctgctcctgatcctgactttctagatattattgcattacataggcctgctattacatctcgtagacatactgtgcgttttagtagagtaggtcaaaaagccacacttaaaactcgcagtggtaaacaaattggagctagaatacattattatcaggatttaagtcctattgtgcctttagaccacaccgtgccaaatgaacaatatgaattacagcctttacatgatacttctacatcgtcttatagtattaatgatggtttgtatgatgtttatgctgacgatgtggataatgtacacaccccaatgcaacactcatacagtacgtttgcaacaacacgtaccagcaatgtgtctatacctttaaatacaggatttgatactcctgttatgtctggccctgatataccttcccctttatttcccacatctagcccatttgttcctatttcgcctttttttccttttgacaccattgttgtagacggtgctgactttgttttacatcctagttattttattttacgtcgcaggcgtaaacgttttccatatttttttacagatgtccgtgtggcggcctagtgaggccacagtgtacctgcctcctgtacctgtatctaaagttgtcagcactgatgaatatgtgtctcgcacaagcatttattattatgctggtagttccagacttcttgctgttggccatccatatttttctattaaaaatcctactaacgctaaaaaattattggtacccaaagtatcaggcttgcaatatagggtttttagggtccgtttaccagatcctaataaatttggatttcctgacacctccttttataaccctgatacacaacgattagtatgggcatgtgtaggccttgaaataggtagagggcagccattaggcgttggcataagtggtcatcctttattaaacaaatttgatgacactgaaaccggtaacaagtatcctggacaaccgggtgctgataatagggaatgtttatccatggattataaacaaacacagttatgtttacttggatgtaagcctccaacaggggaacattggggtaaaggtgttgcttgtactaatgcagcacctgccaatgattgtccacctttagaacttataaatactattattgaggatggtgatatggtggacacaggatttggttgcatggattttaaaacattgcaggctaataaaagtgatgttcctattgatatttgtggcagtacatgcaaatatccagattatttaaaaatgactagtgagccttatggtgatagtttatttttctttcttcgacgtgaacaaatgtttgtaagacacttttttaatagggctggtacattaggagaggctgttcccgatgacctgtacattaaaggttcaggaactactgcctctattcaaagcagtgctttttttcccactcctagtggatcaatggttacttccgaatctcagttatttaataagccatattggctacaacgtgcacaaggtcataataatggtatttgttggggcaatcaggtatttgttactgtggtagataccactcgcagtactaatatgactttatgcacacaagtaactagtgacagtacatataaaaatgaaaattttaaagaatatataagacatgttgaagaatatgatctacagtttgtttttcaactatgcaaagttaccttaactgcagaagttatgacatatattcatgctatgaatccagatattttagaagattggcaatttggtttaacacctcctccatctgctagtttacaggatacctataggtttgttacctctcaggctattacgtgtcaaaaaacagtacctccaaaggaaaaggaagaccccttaggtaaatatacattttgggaagtggatttaaaggaaaaattttcagcagatttagatcagtttcctttgggacgcaagtttttattacaggcaggtcttaaagcaaaacctaaacttaaacgtgcagcccccacatccacccgcacatcgtctgcaaaacgcaaaaaggttaaaaaataacactttgtgtaattgtgttatgttgttgttttgttctgtctatgtactttgtgttgttgtgttgtgttgttgtttgttttttgtgtatgtgttacaatgtatgttatgttgtatgttactgtgtttgttttatgtgtacttgtttgtgtgcatgttctatgtacttgtcagtttcctgtttgtgtatatgttaataaaacattgtgtgtatttgttaaactatttgtatgtatgttatgtatatgggtgtacctatatgagtaaggagttgtattgcttgccctaccctgcattgcaatgtacctacctttatttccctatatttgtagtacctacatgtttagtattgctttaccttttgacatactagtgtccatattgtacaatttcctccattttgtatgcctaaccgttttcggttacttggcatacataccctatgacattggcagaacagttaatccttttctttcctgcactgtgtttgtctgtacttgctgcattggcatacataccctatgacattggcagaacagttaatccttttctttcctgcactgtgtttgtctgtacttgctgcattgactcatatatacatgcagtgcaattgcaaaatacttaattgtactaatagtttacacatgcttttaggcacatatttttactttactttcaaaccttaagtgcagttttggcttacacaattgctttgtatgccaaactatgccttgtaaaagtgagtcactacctgtttattaccaggtgtggactaaccgttttaggtcatattggtcatttataatcttttatataata

SEQ ID NO: 632 - DNA, 7909 bp, Papilloma virus
gtaaautataatguuaagttttaaaaaagtagggtgtaauugaaaguggttuaauugaaaauggtguatatataaaguaaauattttguagtaaggtautguaugautatgtttuaagauautgaggaaaaauuaugaauattguatgatttgtguuaaguattggagauaautatauauaauattgaautauagtgugtggaatguaaaaaauutttguaaugatutgaggtatatgattttguatttguagatttaauagttgtatatagagagggaaatuuatttggaatatgtaaautgtgtttguggttuttatutaaaattagtgaatatagauattataattattutgtatatggaaatauattagaauaaauagttaaaaaauutttaaatgaaatattaattaggtgtattatatgtuaaagauutttgtgtuutuaagaaaaaaaaugauatgtggatttaaauaaaugatttuataatatttugggtugttggguagggugutgtguggugtgttggaggtuuugaugtagagaaautguautgtgaugtgtaaaaauguuatgagaggauauaaguuaaugttaaaggaatatgttttagatttatatuutgaauuaautgauutatautgutatgaguaattaagtgauagutuagatgaggatgaagguttggauugguuagatggauaaguauaauuaguuauagutgattautauattgtaauutgttgtuauauttgtaauauuauagttugtttatgtgtuaauagtauaguaagtgauutaugaauuatauaguaautauttatggguauagtgaatattgtgtguuutauutgtguauaauaataaauatuatutauaatgguugatuutgaaggtauaaatggggutgggatggggtgtautggttggtttgaggtagaaguagtuatagagagaagaauaggagataatatttuagaagatgaggatgaaauaguagatgauagtgguauggatttautagagtttatagatgattutatggaaaatagtatauagguagauauagagguaguuuggguattgtttaatatauaggaaggggaggatgatttaaatgutgtgtgtguautaaaaugaaagtttguuguatgttuauaaagtgutguggaggaugttgttgatugtgutguaaauuugtgtagaaugtutattaataaaaataaagaatguauatauagaaaaugaaaaatagatgagutagaagauaguggatatgguaatautgaagtggaaautuaguagatggtauaauaggtagaaagtuaaaatggugauauaaauttaaatgauttagaatutagtggggtgggggatgattuagaagtaagutgtgagauaaatgtagatagutgtgaaaatgttaugttguaggaaattagtaatgttutauatagtagtaatauaaaaguaaatatattatataaatttaaagagguutatggaataagttttatggaattagtaagauuatttaaaagtgataaaauaagutgtauagattggtgtataauaggatatggaattagtuuatuagtaguagaaagtttaaaagtattaattaaauaguatagtttgtatautuatttauaatgtttaauttgugatagaggaataataatattattgttaattagatttaggtgtaguaaaaauaggttaauagtaguaaaautaatgagtaatttattatuaatauutgaaauatgtatggttatagaguuauuaaaattauggaguuaaauatgtguattgtattggtttagaauaguaatgtuaaauattagtgatgtauaaggtauaauauutgaatggatagatagautaautgttttauaauatagutttaatgataatatatttgatttaagtgaaatggtauagtggguatatgataaugagttaauggaugatagtgauattguatattattatguauaauttguagattuaaatagtaatgutgutguatttttaaaaagtaautuauaaguaaaaatagtaaaggautgtggaataatgtgtagauattataaaaaaguagaaaaaugtaaaatgtuaataggauaatggatauaaagtagatgtgaaaaaauaaatgatggaggaaattggagauuaatagtauagttgttaagatatuaaaauattgaatttauaguatttttaggtguatttaaaaagtttttaaaaggtatauuaaaaaaaagutgtatgutaatttgtggauuaguaaatauaggaaagtuatattttggaatgagtttaatauagtttttaaaagggtgtgttatatuatgtgtaaattutaaaagtuauttttggttguaguuattatuagatguaaaaataggaatgatagatgatgtaauguuaataagttggauatatatagatgattauatgagaaatgugttagatggaaatgaaatttuaatagatgtgaaauataggguattagtguaattaaaatgtuuauuautguttuttauutuaaatauaaatguagguauagaututagatgguuatatttauatagtagattaauagtatttgaatttaaaaatuuattuuuatttgatgaaaatggtaauuuagtgtatguaataaatgatgaaaattggaaatuutttttutuaaggaugtggtguaaattagatttaatagaggaagaggauaaggaaaauuatggaggaaatatuaguaugtttaaatguagtguaggagaaaatautagatutttaugaagutgataaaautgatttauuatuauaaattgaauattggaaautgatauguatggagtgtgutttattgtatauaguuaaauaaatgggattttuauatttatguuauuaggtggtguuttutttgttaguatuaaagauuaaaguatttuaagtaattgaautauaaatgguattagagauattaagtaaatuauagtatagtauaaguuaatggauattguaauaaauaaguttagaggtgtggutttgtgaauuauuaaaatgttttaaaaaauaaggagaaauagtaautgtguaatatgauaatgauaaaaaaaatauaatggattatauaaautggggtgaaatatatattatagaggaagatauatgtautatggttauagggaaagtagattatataggtatgtattatatauataautgtgaaaaggtatattttaaatattttaaagaggatgutguaaagtattutaaaauauaaatgtgggaagtauatgtgggtggtuaggtaattgtttgtuutaugtutatatutaguaauuaaatatuuautautgaaautgutgauatauagauagauaaugataauugauuauuauaaguagugguuaaaugaugaugauutguagauauuauagauauuguuuaguuuuttauaaagutgttutgtguagauuuuguuttggauaatagaauaguaugtautguaautaautguauaaauaaguaguggautgtgtgtagttutaaugttguauutatagtguatttaaaaggtgaatuaaatagtttaaaatgtttaagatauagattaaaauuttataaagagttgtatagttutatgtuatuuauutgguattggauuagtgauaauaaaaatagtaaaaatggaattgtaautgtaauatttgtaautgaauaguaauaauaaatgtttttaggtauugtaaaaatauuauutautgtguaaataagtautggatttatgauattataagtgtauatuauaaguuaatatgtgutgutaattgtatataauuatgatatttgtttttgtattatgttttatattgtttttatguttatuuttattattaugtuutttaatautttuuatttutauutatguttggttgutggtgttggtattgutgutttgggtgtttgtgggatutuutttaaaaatttttttttgutatttgttgtttttatatttauuaatgatgtgtattaattttuatguauaguatatgauauaauaagagtaatgtatatauatgtatatattgtttgtatatatgtguauatggtggtgttttaauattgttgttgttattttagtttttttttttttgtattautaataaatauutttatattttaguagtgtattattatgagauauaaaugatutauaagguguaagugtguatutguaauauaautatauuaaauatguaagguuauagguauutguuuauuugatgttattuutaaagtggaaggaagtauuataguagatuaaattuttaaatatgguagtttaggggttttttttggtggtttaggtattgguauaggututggttuaggtggaaggautggutatgtauutattggtautgauuuauutauagutguaatuuuuttguaguutataugtuutuuggttautgtagauautgttggauutttagautugtutatagtgtuattaatagaagaaauaagttttatagagguaggtguauuaguuuuatutattuutauauuatuaggttttgatgttautauatutguagatautauauutguaattattaatgtttuatutgttggggagtuatutattuaaautatttutauauatttaaatuuuauatttautgaauuatutgtautauauuutuuaguguutguagaaguututggauattttatattttuttuuuutautgttaguauauaaagttatgaaaauatauuaatggatauutttgttgtttuuauagauagtagtaatgtaauatuaaguauguuuattuuagggtutuguuutgtgguauguuttggtttatatagtuguaatauuuaauaggttaaggttgttgauuutguttttttaauatuguutuataaauttataauatatgataatuutguatttgaaagutttgauuutgaagauauattauaatttuaauatagtgatatatuauutgutuutgatuutgautttutagatattattguattauatagguutgutattauatutugtagauatautgtgugttttagtagagtaggtuaaaaaguuauauttaaaautuguagtggtaaauaaattggagutagaatauattattatuaggatttaagtuutattgtguutttagauuauauugtguuaaatgaauaatatgaattauaguutttauatgatauttutauatugtuttatagtattaatgatggtttgtatgatgtttatgutgaugatgtggataatgtauauauuuuaatguaauautuatauagtaugtttguaauaauaugtauuaguaatgtgtutatauutttaaatauaggatttgatautuutgttatgtutgguuutgatatauuttuuuutttatttuuuauatutaguuuatttgttuutatttuguutttttttuuttttgauauuattgttgtagauggtgutgautttgttttauatuutagttattttattttaugtuguaggugtaaaugttttuuatatttttttauagatgtuugtgtggugguutagtgagguuauagtgtauutguutuutgtauutgtatutaaagttgtuaguautgatgaatatgtgtutuguauaaguatttattattatgutggtagttuuagauttuttgutgttgguuatuuatatttttutattaaaaatuutautaaugutaaaaaattattggtauuuaaagtatuagguttguaatatagggtttttagggtuugtttauuagatuutaataaatttggatttuutgauauutuuttttataauuutgatauauaaugattagtatggguatgtgtagguuttgaaataggtagaggguaguuattaggugttgguataagtggtuatuutttattaaauaaatttgatgauautgaaauuggtaauaagtatuutggauaauugggtgutgataatagggaatgtttatuuatggattataaauaaauauagttatgtttauttggatgtaaguutuuaauaggggaauattggggtaaaggtgttguttgtautaatguaguauutguuaatgattgtuuauutttagaauttataaatautattattgaggatggtgatatggtggauauaggatttggttguatggattttaaaauattguaggutaataaaagtgatgttuutattgatatttgtgguagtauatguaaatatuuagattatttaaaaatgautagtgaguuttatggtgatagtttatttttutttuttugaugtgaauaaatgtttgtaagauauttttttaatagggutggtauattaggagaggutgttuuugatgauutgtauattaaaggttuaggaautautguututattuaaaguagtgutttttttuuuautuutagtggatuaatggttauttuugaatutuagttatttaataaguuatattggutauaaugtguauaaggtuataataatggtatttgttgggguaatuaggtatttgttautgtggtagatauuautuguagtautaatatgautttatguauauaagtaautagtgauagtauatataaaaatgaaaattttaaagaatatataagauatgttgaagaatatgatutauagtttgtttttuaautatguaaagttauuttaautguagaagttatgauatatattuatgutatgaatuuagatattttagaagattgguaatttggtttaauauutuutuuatutgutagtttauaggatauutataggtttgttauututuaggutattaugtgtuaaaaaauagtauutuuaaaggaaaaggaagauuuuttaggtaaatatauattttgggaagtggatttaaaggaaaaattttuaguagatttagatuagtttuutttgggauguaagtttttattauagguaggtuttaaaguaaaauutaaauttaaaugtguaguuuuuauatuuauuuguauatugtutguaaaauguaaaaaggttaaaaaataauautttgtgtaattgtgttatgttgttgttttgttutgtutatgtautttgtgttgttgtgttgtgttgttgtttgttttttgtgtatgtgttauaatgtatgttatgttgtatgttautgtgtttgttttatgtgtauttgtttgtgtguatgttutatgtauttgtuagtttuutgtttgtgtatatgttaataaaauattgtgtgtatttgttaaautatttgtatgtatgttatgtatatgggtgtauutatatgagtaaggagttgtattguttguuutauuutguattguaatgtauutauutttatttuuutatatttgtagtauutauatgtttagtattgutttauuttttgauatautagtgtuuatattgtauaatttuutuuattttgtatguutaauugttttuggttauttgguatauatauuutatgauattgguagaauagttaatuuttttutttuutguautgtgtttgtutgtauttgutguattgguatauatauuutatgauattgguagaauagttaatuuttttutttuutguautgtgtttgtutgtauttgutguattgautuatatatauatguagtguaattguaaaatauttaattgtautaatagtttauauatguttttagguauatatttttautttautttuaaauuttaagtguagttttgguttauauaattgutttgtatguuaaautatguuttgtaaaagtgagtuautauutgtttattauuaggtgtggautaauugttttaggtuatattggtuatttataatuttttatataata

SEQ ID NO: 633 - DNA, 7909 bp, Papilloma virus
gtaaattataatgttaagttttaaaaaagtagggtgtaattgaaagtggtttaattgaaaatggtgtatatataaagtaaatattttgtagtaaggtattgtatgattatgttttaagatattgaggaaaaattatgaatattgtatgatttgtgttaagtattggagataattatatataatattgaattatagtgtgtggaatgtaaaaaatttttgtaatgatttgaggtatatgattttgtatttgtagatttaatagttgtatatagagagggaaatttatttggaatatgtaaattgtgtttgtggtttttatttaaaattagtgaatatagatattataattattttgtatatggaaatatattagaataaatagttaaaaaatttttaaatgaaatattaattaggtgtattatatgttaaagatttttgtgtttttaagaaaaaaaatgatatgtggatttaaataaatgattttataatattttgggttgttgggtagggtgttgtgtggtgtgttggaggttttgatgtagagaaattgtattgtgatgtgtaaaaatgttatgagaggatataagttaatgttaaaggaatatgttttagatttatattttgaattaattgatttatattgttatgagtaattaagtgatagtttagatgaggatgaaggtttggattggttagatggataagtataattagttatagttgattattatattgtaatttgttgttatatttgtaatattatagtttgtttatgtgttaatagtatagtaagtgatttatgaattatatagtaattatttatgggtatagtgaatattgtgtgttttatttgtgtataataataaatattatttataatggttgattttgaaggtataaatggggttgggatggggtgtattggttggtttgaggtagaagtagttatagagagaagaataggagataatattttagaagatgaggatgaaatagtagatgatagtggtatggatttattagagtttatagatgattttatggaaaatagtatataggtagatatagaggtagtttgggtattgtttaatatataggaaggggaggatgatttaaatgttgtgtgtgtattaaaatgaaagtttgttgtatgtttataaagtgttgtggaggatgttgttgattgtgttgtaaatttgtgtagaatgtttattaataaaaataaagaatgtatatatagaaaatgaaaaatagatgagttagaagatagtggatatggtaatattgaagtggaaatttagtagatggtataataggtagaaagttaaaatggtgatataaatttaaatgatttagaatttagtggggtgggggatgatttagaagtaagttgtgagataaatgtagatagttgtgaaaatgttatgttgtaggaaattagtaatgttttatatagtagtaatataaaagtaaatatattatataaatttaaagaggtttatggaataagttttatggaattagtaagattatttaaaagtgataaaataagttgtatagattggtgtataataggatatggaattagtttattagtagtagaaagtttaaaagtattaattaaatagtatagtttgtatatttatttataatgtttaatttgtgatagaggaataataatattattgttaattagatttaggtgtagtaaaaataggttaatagtagtaaaattaatgagtaatttattattaatatttgaaatatgtatggttatagagttattaaaattatggagttaaatatgtgtattgtattggtttagaatagtaatgttaaatattagtgatgtataaggtataatatttgaatggatagatagattaattgttttataatatagttttaatgataatatatttgatttaagtgaaatggtatagtgggtatatgataatgagttaatggatgatagtgatattgtatattattatgtataatttgtagatttaaatagtaatgttgttgtatttttaaaaagtaatttataagtaaaaatagtaaaggattgtggaataatgtgtagatattataaaaaagtagaaaaatgtaaaatgttaataggataatggatataaagtagatgtgaaaaaataaatgatggaggaaattggagattaatagtatagttgttaagatattaaaatattgaatttatagtatttttaggtgtatttaaaaagtttttaaaaggtatattaaaaaaaagttgtatgttaatttgtggattagtaaatataggaaagttatattttggaatgagtttaatatagtttttaaaagggtgtgttatattatgtgtaaattttaaaagttatttttggttgtagttattattagatgtaaaaataggaatgatagatgatgtaatgttaataagttggatatatatagatgattatatgagaaatgtgttagatggaaatgaaattttaatagatgtgaaatatagggtattagtgtaattaaaatgtttattattgttttttattttaaatataaatgtaggtatagattttagatggttatatttatatagtagattaatagtatttgaatttaaaaatttatttttatttgatgaaaatggtaatttagtgtatgtaataaatgatgaaaattggaaatttttttttttaaggatgtggtgtaaattagatttaatagaggaagaggataaggaaaattatggaggaaatattagtatgtttaaatgtagtgtaggagaaaatattagatttttatgaagttgataaaattgatttattattataaattgaatattggaaattgatatgtatggagtgtgttttattgtatatagttaaataaatgggatttttatatttatgttattaggtggtgttttttttgttagtattaaagattaaagtattttaagtaattgaattataaatggtattagagatattaagtaaattatagtatagtataagttaatggatattgtaataaataagtttagaggtgtggttttgtgaattattaaaatgttttaaaaaataaggagaaatagtaattgtgtaatatgataatgataaaaaaaatataatggattatataaattggggtgaaatatatattatagaggaagatatatgtattatggttatagggaaagtagattatataggtatgtattatatatataattgtgaaaaggtatattttaaatattttaaagaggatgttgtaaagtattttaaaatataaatgtgggaagtatatgtgggtggttaggtaattgtttgttttatgtttatatttagtaattaaatatttattattgaaattgttgatatatagatagataatgataattgattattataagtagtggttaaatgatgatgatttgtagatattatagatattgtttagttttttataaagttgttttgtgtagattttgttttggataatagaatagtatgtattgtaattaattgtataaataagtagtggattgtgtgtagttttaatgttgtatttatagtgtatttaaaaggtgaattaaatagtttaaaatgtttaagatatagattaaaattttataaagagttgtatagttttatgttatttatttggtattggattagtgataataaaaatagtaaaaatggaattgtaattgtaatatttgtaattgaatagtaataataaatgtttttaggtattgtaaaaatattatttattgtgtaaataagtattggatttatgatattataagtgtatattataagttaatatgtgttgttaattgtatataattatgatatttgtttttgtattatgttttatattgtttttatgtttatttttattattatgttttttaatattttttatttttatttatgtttggttgttggtgttggtattgttgttttgggtgtttgtgggattttttttaaaaatttttttttgttatttgttgtttttatatttattaatgatgtgtattaatttttatgtatagtatatgatataataagagtaatgtatatatatgtatatattgtttgtatatatgtgtatatggtggtgttttaatattgttgttgttattttagtttttttttttttgtattattaataaatatttttatattttagtagtgtattattatgagatataaatgatttataaggtgtaagtgtgtatttgtaatataattatattaaatatgtaaggttataggtatttgtttatttgatgttatttttaaagtggaaggaagtattatagtagattaaatttttaaatatggtagtttaggggttttttttggtggtttaggtattggtataggttttggtttaggtggaaggattggttatgtatttattggtattgatttatttatagttgtaatttttttgtagtttatatgttttttggttattgtagatattgttggatttttagatttgtttatagtgttattaatagaagaaataagttttatagaggtaggtgtattagttttatttatttttatattattaggttttgatgttattatatttgtagatattatatttgtaattattaatgttttatttgttggggagttatttatttaaattatttttatatatttaaattttatatttattgaattatttgtattatattttttagtgtttgtagaagtttttggatattttatattttttttttttattgttagtatataaagttatgaaaatatattaatggatatttttgttgtttttatagatagtagtaatgtaatattaagtatgtttattttagggttttgttttgtggtatgttttggtttatatagttgtaatatttaataggttaaggttgttgattttgtttttttaatattgttttataaatttataatatatgataattttgtatttgaaagttttgattttgaagatatattataattttaatatagtgatatattatttgtttttgattttgattttttagatattattgtattatataggtttgttattatattttgtagatatattgtgtgttttagtagagtaggttaaaaagttatatttaaaatttgtagtggtaaataaattggagttagaatatattattattaggatttaagttttattgtgtttttagattatattgtgttaaatgaataatatgaattatagtttttatatgatatttttatattgttttatagtattaatgatggtttgtatgatgtttatgttgatgatgtggataatgtatatattttaatgtaatatttatatagtatgtttgtaataatatgtattagtaatgtgtttatatttttaaatataggatttgatatttttgttatgtttggttttgatatatttttttttttattttttatatttagtttatttgtttttattttgtttttttttttttttgatattattgttgtagatggtgttgattttgttttatattttagttattttattttatgttgtaggtgtaaatgttttttatatttttttatagatgtttgtgtggtggtttagtgaggttatagtgtatttgttttttgtatttgtatttaaagttgttagtattgatgaatatgtgttttgtataagtatttattattatgttggtagttttagattttttgttgttggttatttatatttttttattaaaaattttattaatgttaaaaaattattggtatttaaagtattaggtttgtaatatagggtttttagggtttgtttattagattttaataaatttggattttttgatatttttttttataattttgatatataatgattagtatgggtatgtgtaggttttgaaataggtagagggtagttattaggtgttggtataagtggttattttttattaaataaatttgatgatattgaaattggtaataagtattttggataattgggtgttgataatagggaatgtttatttatggattataaataaatatagttatgtttatttggatgtaagtttttaataggggaatattggggtaaaggtgttgtttgtattaatgtagtatttgttaatgattgtttatttttagaatttataaatattattattgaggatggtgatatggtggatataggatttggttgtatggattttaaaatattgtaggttaataaaagtgatgtttttattgatatttgtggtagtatatgtaaatatttagattatttaaaaatgattagtgagttttatggtgatagtttatttttttttttttgatgtgaataaatgtttgtaagatatttttttaatagggttggtatattaggagaggttgtttttgatgatttgtatattaaaggtttaggaattattgtttttatttaaagtagtgtttttttttttatttttagtggattaatggttatttttgaattttagttatttaataagttatattggttataatgtgtataaggttataataatggtatttgttggggtaattaggtatttgttattgtggtagatattatttgtagtattaatatgattttatgtatataagtaattagtgatagtatatataaaaatgaaaattttaaagaatatataagatatgttgaagaatatgatttatagtttgttttttaattatgtaaagttattttaattgtagaagttatgatatatatttatgttatgaatttagatattttagaagattggtaatttggtttaatattttttttatttgttagtttataggatatttataggtttgttattttttaggttattatgtgttaaaaaatagtatttttaaaggaaaaggaagattttttaggtaaatatatattttgggaagtggatttaaaggaaaaatttttagtagatttagattagttttttttgggatgtaagtttttattataggtaggttttaaagtaaaatttaaatttaaatgtgtagtttttatatttatttgtatattgtttgtaaaatgtaaaaaggttaaaaaataatattttgtgtaattgtgttatgttgttgttttgttttgtttatgtattttgtgttgttgtgttgtgttgttgtttgttttttgtgtatgtgttataatgtatgttatgttgtatgttattgtgtttgttttatgtgtatttgtttgtgtgtatgttttatgtatttgttagttttttgtttgtgtatatgttaataaaatattgtgtgtatttgttaaattatttgtatgtatgttatgtatatgggtgtatttatatgagtaaggagttgtattgtttgttttattttgtattgtaatgtatttatttttatttttttatatttgtagtatttatatgtttagtattgttttattttttgatatattagtgtttatattgtataattttttttattttgtatgtttaattgtttttggttatttggtatatatattttatgatattggtagaatagttaattttttttttttttgtattgtgtttgtttgtatttgttgtattggtatatatattttatgatattggtagaatagttaattttttttttttttgtattgtgtttgtttgtatttgttgtattgatttatatatatatgtagtgtaattgtaaaatatttaattgtattaatagtttatatatgtttttaggtatatatttttattttatttttaaattttaagtgtagttttggtttatataattgttttgtatgttaaattatgttttgtaaaagtgagttattatttgtttattattaggtgtggattaattgttttaggttatattggttatttataattttttatataata

SEQ ID NO: 634 - DNA, 7909 bp, Papilloma virus
catttgatattacggttcaaaattttttcatcccacattggctttcgccaagttggcttttgccacgtatatatttcgtttgtaaaacgtcattccatgacgtgctgatacaaagttctgtgactcctttttggtgcttgtaacgtactaaacacggttcgtaacctctgttgatatgtgttgtaacttgatgtcacgcaccttacgttttttggaaacgttgctagactccatatactaaaacgtaaacgtctaaattgtcaacatatatctctccctttaggtaaaccttatacatttgacacaaacgccaagaatagattttaatcacttatatctgtaatattaataagacatatacctttatgtaatcttgtttgtcaattttttggaaatttactttataattaatccacataatatacagtttctggaaacacaggagttcttttttttgctgtacacctaaatttgtttgctaaagtattataaagcccagcaacccgtcccgcgacacgccgcacaacctccagggctgcatctctttgacgtgacactgcacatttttgcggtactctcctgtgttcggttgcaatttccttatacaaaatctaaatataggacttggttgactggatatgacgatactcgttaattcactgtcgagtctactcctacttccgaacctggccggtctacctgttcgtgttggtcggtgtcgactaatgatgtaacattggacaacagtgtgaacattgtggtgtcaagcaaatacacagttgtcatgtcgttcactggatgcttggtatgtcgttgatgaatacccgtgtcacttataacacacgggatggacacgtgttgttatttgtagtagatgttaccggctaggacttccatgtttaccccgaccctaccccacatgaccaaccaaactccatcttcgtcagtatctctcttcttgtcctctattataaagtcttctactcctactttgtcgtctactgtcaccgtgcctaaatgatctcaaatatctactaagataccttttatcatatgtccgtctgtgtctccgtcgggcccgtaacaaattatatgtccttcccctcctactaaatttacgacacacacgtgattttgctttcaaacggcgtacaagtgtttcacgacgcctcctgcaacaactagcacgacgtttgggcacatcttgcagataattatttttatttcttacgtgtatgtcttttgctttttatctactcgatcttctgtcgcctataccgttatgacttcacctttgagtcgtctaccatgttgtccatctttcagttttaccgctgtgtttgaatttactgaatcttagatcaccccaccccctactaagtcttcattcgacactctgtttacatctatcgacacttttacaatgcaacgtcctttaatcattacaagatgtatcatcattatgttttcgtttatataatatatttaaatttctccggataccttattcaaaataccttaatcattctggtaaattttcactattttgttcgacatgtctaaccacatattgtcctataccttaatcaggtagtcatcgtctttcaaattttcataattaatttgtcgtatcaaacatatgagtaaatgttacaaattgaacgctatctccttattattataataacaattaatctaaatccacatcgtttttgtccaattgtcatcgttttgattactcattaaataatagttatggactttgtacataccaatatctcggtggttttaatgcctcggtttgtacacgtaacataaccaaatcttgtcgttacagtttgtaatcactacatgttccatgttgtggacttacctatctatctgattgacaaaatgttgtatcgaaattactattatataaactaaattcactttaccatgtcacccgtatactattgctcaattgcctgctatcactgtaacgtataataatacgtgttgaacgtctaagtttatcattacgacgacgtaaaaatttttcattgagtgttcgtttttatcatttcctgacaccttattacacatctgtaatattttttcgtctttttgcattttacagttatcctgttacctatgtttcatctacacttttttgtttactacctcctttaacctctggttatcatgtcaacaattctatagttttgtaacttaaatgtcgtaaaaatccacgtaaatttttcaaaaattttccatatggttttttttcgacatacgattaaacacctggtcgtttatgtcctttcagtataaaaccttactcaaattatgtcaaaaattttcccacacaatatagtacacatttaagattttcagtgaaaaccaacgtcggtaatagtctacgtttttatccttactatctactacattgcggttattcaacctgtatatatctactaatgtactctttacgcaatctacctttactttaaagttatctacactttgtatcccgtaatcacgttaattttacaggtggtgacgaagaatggagtttatgtttacgtccgtgtctgagatctaccggtataaatgtatcatctaattgtcataaacttaaatttttaggtaagggtaaactacttttaccattgggtcacatacgttatttactacttttaacctttaggaaaaagagttcctgcaccacgtttaatctaaattatctccttctcctgttccttttggtacctcctttatagtcgtgcaaatttacgtcacgtcctcttttatgatctagaaatgcttcgactattttgactaaatggtagtgtttaacttgtaacctttgactatgcgtacctcacacgaaataacatatgtcggtttgtttaccctaaaagtgtaaatacggtggtccaccacggaagaaacaatcgtagtttctggtttcgtaaagttcattaacttgatgtttaccgtaatctctgtaattcatttagtgtcatatcatgttcggttacctgtaacgttgtttgttcgaatctccacaccgaaacacttggtggttttacaaaattttttgttcctctttgtcattgacacgttatactgttactgttttttttatgttacctaatatgtttgaccccactttatatataatatctccttctatgtacatgataccaatgtccctttcatctaatatatccatacataatatatgtattgacacttttccatataaaatttataaaatttctcctacgacgtttcataagattttgtgtttacacccttcatgtacacccaccagtccattaacaaacaggatgcagatatagatcgttggtttataggtgatgactttgacgactgtatgtctgtctgttgctattggctggtggtgttcgtcgccggtttgctgctgctggacgtctgtggtgtctgtggcgggtcggggaatgtttcgacaagacacgtctggggcggaacctgttatcttgtcgtgcatgacgttgattgacgtgtttgttcgtcgcctgacacacatcaagattgcaacgtggatatcacgtaaattttccacttagtttatcaaattttacaaattctatgtctaattttggaatatttctcaacatatcaagatacagtaggtggaccgtaacctggtcactgttgtttttatcatttttaccttaacattgacattgtaaacattgacttgtcgttgttgtttacaaaaatccatggcatttttatggtggatgacacgtttattcatgacctaaatactgtaatattcacatgtagtgttcggttatacacgacgattaacatatattggtactataaacaaaaacataatacaaaatataacaaaaatacgaataggaataataatgcaggaaattatgaaaggtaaagatggatacgaaccaacgaccacaaccataacgacgaaacccacaaacaccctagaggaaatttttaaaaaaaaacgataaacaacaaaaatataaatggttactacacataattaaaagtacgtgtcgtatactgtgttgttctcattacatatatgtacatatataacaaacatatatacacgtgtaccaccacaaaattgtaacaacaacaataaaatcaaaaaaaaaaaaacataatgattatttatggaaatataaaatcgtcacataataatactctgtgtttgctagatgttccgcgttcgcacgtagacgttgtgttgatatggtttgtacgttccggtgtccgtggacgggtgggctacaataaggatttcaccttccttcatggtatcgtctagtttaagaatttataccgtcaaatccccaaaaaaaaccaccaaatccataaccgtgtccgagaccaagtccaccttcctgaccgatacatggataaccatgactgggtggatgtcgacgttaggggaacgtcggatatgcaggaggccaatgacatctgtgacaacctggaaatctgagcagatatcacagtaattatcttctttgttcaaaatatctccgtccacgtggtcggggtagataaggatgtggtagtccaaaactacaatgatgtagacgtctatgatgtggacgttaataattacaaagtagacaacccctcagtagataagtttgataaagatgtgtaaatttagggtgtaaatgacttggtagacatgatgtgggaggtcgcggacgtcttcggagacctgtaaaatataaaagaaggggatgacaatcgtgtgtttcaatacttttgtatggttacctatggaaacaacaaaggtgtctgtcatcattacattgtagttcgtgcgggtaaggtcccagagcgggacaccgtgcggaaccaaatatatcagcgttatgggttgtccaattccaacaactgggacgaaaaaattgtagcggagtatttgaatattgtatactattaggacgtaaactttcgaaactgggacttctgtgtaatgttaaagttgtatcactatatagtggacgaggactaggactgaaagatctataataacgtaatgtatccggacgataatgtagagcatctgtatgacacgcaaaatcatctcatccagtttttcggtgtgaattttgagcgtcaccatttgtttaacctcgatcttatgtaataatagtcctaaattcaggataacacggaaatctggtgtggcacggtttacttgttatacttaatgtcggaaatgtactatgaagatgtagcagaatatcataattactaccaaacatactacaaatacgactgctacacctattacatgtgtggggttacgttgtgagtatgtcatgcaaacgttgttgtgcatggtcgttacacagatatggaaatttatgtcctaaactatgaggacaatacagaccgggactatatggaaggggaaataaagggtgtagatcgggtaaacaaggataaagcggaaaaaaaggaaaactgtggtaacaacatctgccacgactgaaacaaaatgtaggatcaataaaataaaatgcagcgtccgcatttgcaaaaggtataaaaaaatgtctacaggcacaccgccggatcactccggtgtcacatggacggaggacatggacatagatttcaacagtcgtgactacttatacacagagcgtgttcgtaaataataatacgaccatcaaggtctgaagaacgacaaccggtaggtataaaaagataatttttaggatgattgcgattttttaataaccatgggtttcatagtccgaacgttatatcccaaaaatcccaggcaaatggtctaggattatttaaacctaaaggactgtggaggaaaatattgggactatgtgttgctaatcatacccgtacacatccggaactttatccatctcccgtcggtaatccgcaaccgtattcaccagtaggaaataatttgtttaaactactgtgactttggccattgttcataggacctgttggcccacgactattatcccttacaaataggtacctaatatttgtttgtgtcaatacaaatgaacctacattcggaggttgtccccttgtaaccccatttccacaacgaacatgattacgtcgtggacggttactaacaggtggaaatcttgaatatttatgataataactcctaccactataccacctgtgtcctaaaccaacgtacctaaaattttgtaacgtccgattattttcactacaaggataactataaacaccgtcatgtacgtttataggtctaataaatttttactgatcactcggaataccactatcaaataaaaagaaagaagctgcacttgtttacaaacattctgtgaaaaaattatcccgaccatgtaatcctctccgacaagggctactggacatgtaatttccaagtccttgatgacggagataagtttcgtcacgaaaaaaagggtgaggatcacctagttaccaatgaaggcttagagtcaataaattattcggtataaccgatgttgcacgtgttccagtattattaccataaacaaccccgttagtccataaacaatgacaccatctatggtgagcgtcatgattatactgaaatacgtgtgttcattgatcactgtcatgtatatttttacttttaaaatttcttatatattctgtacaacttcttatactagatgtcaaacaaaaagttgatacgtttcaatggaattgacgtcttcaatactgtatataagtacgatacttaggtctataaaatcttctaaccgttaaaccaaattgtggaggaggtagacgatcaaatgtcctatggatatccaaacaatggagagtccgataatgcacagttttttgtcatggaggtttccttttccttctggggaatccatttatatgtaaaacccttcacctaaatttcctttttaaaagtcgtctaaatctagtcaaaggaaaccctgcgttcaaaaataatgtccgtccagaatttcgttttggatttgaatttgcacgtcgggggtgtaggtgggcgtgtagcagacgttttgcgtttttccaattttttattgtgaaacacattaacacaatacaacaacaaaacaagacagatacatgaaacacaacaacacaacacaacaacaaacaaaaaacacatacacaatgttacatacaatacaacatacaatgacacaaacaaaatacacatgaacaaacacacgtacaagatacatgaacagtcaaaggacaaacacatatacaattattttgtaacacacataaacaatttgataaacatacatacaatacatatacccacatggatatactcattcctcaacataacgaacgggatgggacgtaacgttacatggatggaaataaagggatataaacatcatggatgtacaaatcataacgaaatggaaaactgtatgatcacaggtataacatgttaaaggaggtaaaacatacggattggcaaaagccaatgaaccgtatgtatgggatactgtaaccgtcttgtcaattaggaaaagaaaggacgtgacacaaacagacatgaacgacgtaaccgtatgtatgggatactgtaaccgtcttgtcaattaggaaaagaaaggacgtgacacaaacagacatgaacgacgtaactgagtatatatgtacgtcacgttaacgttttatgaattaacatgattatcaaatgtgtacgaaaatccgtgtataaaaatgaaatgaaagtttggaattcacgtcaaaaccgaatgtgttaacgaaacatacggtttgatacggaacattttcactcagtgatggacaaataatggtccacacctgattggcaaaatccagtataaccagtaaatattagaaaatatattat

SEQ ID NO: 635 - DNA, 7909 bp, Papilloma virus
uatttgatattauggttuaaaattttttuatuuuauattggutttuguuaagttgguttttguuaugtatatatttugtttgtaaaaugtuattuuatgaugtgutgatauaaagttutgtgautuutttttggtguttgtaaugtautaaauauggttugtaauututgttgatatgtgttgtaauttgatgtuauguauuttaugttttttggaaaugttgutagautuuatatautaaaaugtaaaugtutaaattgtuaauatatatututuuutttaggtaaauuttatauatttgauauaaauguuaagaatagattttaatuauttatatutgtaatattaataagauatatauutttatgtaatuttgtttgtuaattttttggaaatttautttataattaatuuauataatatauagtttutggaaauauaggagttuttttttttgutgtauauutaaatttgtttgutaaagtattataaaguuuaguaauuugtuuugugauauguuguauaauutuuagggutguatututttgaugtgauautguauatttttguggtaututuutgtgttuggttguaatttuuttatauaaaatutaaatataggauttggttgautggatatgaugatautugttaattuautgtugagtutautuutauttuugaauutgguuggtutauutgttugtgttggtuggtgtugautaatgatgtaauattggauaauagtgtgaauattgtggtgtuaaguaaatauauagttgtuatgtugttuautggatguttggtatgtugttgatgaatauuugtgtuauttataauauaugggatggauaugtgttgttatttgtagtagatgttauuggutaggauttuuatgtttauuuugauuutauuuuauatgauuaauuaaautuuatuttugtuagtatutututtuttgtuututattataaagtuttutautuutautttgtugtutautgtuauugtguutaaatgatutuaaatatutautaagatauuttttatuatatgtuugtutgtgtutuugtuggguuugtaauaaattatatgtuuttuuuutuutautaaatttaugauauauaugtgattttgutttuaaauggugtauaagtgtttuaugauguutuutguaauaautaguaugaugtttggguauatuttguagataattatttttatttuttaugtgtatgtuttttgutttttatutautugatuttutgtuguutatauugttatgauttuauutttgagtugtutauuatgttgtuuatutttuagttttauugutgtgtttgaatttautgaatuttagatuauuuuauuuuutautaagtuttuattugauaututgtttauatutatugauauttttauaatguaaugtuutttaatuattauaagatgtatuatuattatgttttugtttatataatatatttaaatttutuuggatauuttattuaaaatauuttaatuattutggtaaattttuautattttgttugauatgtutaauuauatattgtuutatauuttaatuaggtagtuatugtutttuaaattttuataattaatttgtugtatuaaauatatgagtaaatgttauaaattgaaugutatutuuttattattataataauaattaatutaaatuuauatugtttttgtuuaattgtuatugttttgattautuattaaataatagttatggautttgtauatauuaatatutuggtggttttaatguutuggtttgtauaugtaauataauuaaatuttgtugttauagtttgtaatuautauatgttuuatgttgtggauttauutatutatutgattgauaaaatgttgtatugaaattautattatataaautaaattuautttauuatgtuauuugtatautattgutuaattguutgutatuautgtaaugtataataataugtgttgaaugtutaagtttatuattaugaugaugtaaaaatttttuattgagtgttugtttttatuatttuutgauauuttattauauatutgtaatattttttugtutttttguattttauagttatuutgttauutatgtttuatutauauttttttgtttautauutuutttaauututggttatuatgtuaauaattutatagttttgtaauttaaatgtugtaaaaatuuaugtaaatttttuaaaaattttuuatatggttttttttugauataugattaaauauutggtugtttatgtuutttuagtataaaauuttautuaaattatgtuaaaaattttuuuauauaatatagtauauatttaagattttuagtgaaaauuaaugtuggtaatagtutaugtttttatuuttautatutautauattguggttattuaauutgtatatatutautaatgtaututttauguaatutauutttautttaaagttatutauautttgtatuuugtaatuaugttaattttauaggtggtgaugaagaatggagtttatgtttaugtuugtgtutgagatutauuggtataaatgtatuatutaattgtuataaauttaaatttttaggtaagggtaaautauttttauuattgggtuauataugttatttautauttttaauutttaggaaaaagagttuutguauuaugtttaatutaaattatutuuttutuutgttuuttttggtauutuutttatagtugtguaaatttaugtuaugtuututtttatgatutagaaatguttugautattttgautaaatggtagtgtttaauttgtaauutttgautatgugtauutuauaugaaataauatatgtuggtttgtttauuutaaaagtgtaaatauggtggtuuauuauggaagaaauaatugtagtttutggtttugtaaagttuattaauttgatgtttauugtaatututgtaattuatttagtgtuatatuatgttuggttauutgtaaugttgtttgttugaatutuuauauugaaauauttggtggttttauaaaattttttgttuututttgtuattgauaugttatautgttautgttttttttatgttauutaatatgtttgauuuuautttatatataatatutuuttutatgtauatgatauuaatgtuuutttuatutaatatatuuatauataatatatgtattgauauttttuuatataaaatttataaaatttutuutaugaugtttuataagattttgtgtttauauuuttuatgtauauuuauuagtuuattaauaaauaggatguagatatagatugttggtttataggtgatgautttgaugautgtatgtutgtutgttgutattggutggtggtgttugtuguuggtttgutgutgutggaugtutgtggtgtutgtggugggtuggggaatgtttugauaagauaugtutgggguggaauutgttatuttgtugtguatgaugttgattgaugtgtttgttugtuguutgauauauatuaagattguaaugtggatatuaugtaaattttuuauttagtttatuaaattttauaaattutatgtutaattttggaatatttutuaauatatuaagatauagtaggtggauugtaauutggtuautgttgtttttatuatttttauuttaauattgauattgtaaauattgauttgtugttgttgtttauaaaaatuuatgguatttttatggtggatgauaugtttattuatgauutaaatautgtaatattuauatgtagtgttuggttatauaugaugattaauatatattggtautataaauaaaaauataatauaaaatataauaaaaataugaataggaataataatguaggaaattatgaaaggtaaagatggataugaauuaaugauuauaauuataaugaugaaauuuauaaauauuutagaggaaatttttaaaaaaaaaugataaauaauaaaaatataaatggttautauauataattaaaagtaugtgtugtatautgtgttgttutuattauatatatgtauatatataauaaauatatatauaugtgtauuauuauaaaattgtaauaauaauaataaaatuaaaaaaaaaaaaauataatgattatttatggaaatataaaatugtuauataataataututgtgtttgutagatgttuugugttuguaugtagaugttgtgttgatatggtttgtaugttuuggtgtuugtggaugggtgggutauaataaggatttuauuttuuttuatggtatugtutagtttaagaatttatauugtuaaatuuuuaaaaaaaauuauuaaatuuataauugtgtuugagauuaagtuuauuttuutgauugatauatggataauuatgautgggtggatgtugaugttaggggaaugtuggatatguaggagguuaatgauatutgtgauaauutggaaatutgaguagatatuauagtaattatuttutttgttuaaaatatutuugtuuaugtggtuggggtagataaggatgtggtagtuuaaaautauaatgatgtagaugtutatgatgtggaugttaataattauaaagtagauaauuuutuagtagataagtttgataaagatgtgtaaatttagggtgtaaatgauttggtagauatgatgtgggaggtuguggaugtuttuggagauutgtaaaatataaaagaaggggatgauaatugtgtgtttuaatauttttgtatggttauutatggaaauaauaaaggtgtutgtuatuattauattgtagttugtgugggtaaggtuuuagagugggauauugtguggaauuaaatatatuagugttatgggttgtuuaattuuaauaautgggaugaaaaaattgtaguggagtatttgaatattgtatautattaggaugtaaautttugaaautgggauttutgtgtaatgttaaagttgtatuautatatagtggaugaggautaggautgaaagatutataataaugtaatgtatuuggaugataatgtagaguatutgtatgauauguaaaatuatutuatuuagtttttuggtgtgaattttgagugtuauuatttgtttaauutugatuttatgtaataatagtuutaaattuaggataauauggaaatutggtgtgguauggtttauttgttatauttaatgtuggaaatgtautatgaagatgtaguagaatatuataattautauuaaauatautauaaataugautgutauauutattauatgtgtggggttaugttgtgagtatgtuatguaaaugttgttgtguatggtugttauauagatatggaaatttatgtuutaaautatgaggauaatauagauugggautatatggaaggggaaataaagggtgtagatugggtaaauaaggataaaguggaaaaaaaggaaaautgtggtaauaauatutguuaugautgaaauaaaatgtaggatuaataaaataaaatguagugtuuguatttguaaaaggtataaaaaaatgtutauagguauauuguuggatuautuuggtgtuauatggauggaggauatggauatagatttuaauagtugtgautauttatauauagagugtgttugtaaataataataugauuatuaaggtutgaagaaugauaauuggtaggtataaaaagataatttttaggatgattgugattttttaataauuatgggtttuatagtuugaaugttatatuuuaaaaatuuuagguaaatggtutaggattatttaaauutaaaggautgtggaggaaaatattgggautatgtgttgutaatuatauuugtauauatuuggaautttatuuatutuuugtuggtaatuuguaauugtattuauuagtaggaaataatttgtttaaautautgtgautttgguuattgttuataggauutgttgguuuaugautattatuuuttauaaataggtauutaatatttgtttgtgtuaatauaaatgaauutauattuggaggttgtuuuuttgtaauuuuatttuuauaaugaauatgattaugtugtggauggttautaauaggtggaaatuttgaatatttatgataataautuutauuautatauuauutgtgtuutaaauuaaugtauutaaaattttgtaaugtuugattattttuautauaaggataautataaauauugtuatgtaugtttataggtutaataaatttttautgatuautuggaatauuautatuaaataaaaagaaagaagutguauttgtttauaaauattutgtgaaaaaattatuuugauuatgtaatuututuugauaagggutautggauatgtaatttuuaagtuuttgatgauggagataagtttugtuaugaaaaaaagggtgaggatuauutagttauuaatgaagguttagagtuaataaattattuggtataauugatgttguaugtgttuuagtattattauuataaauaauuuugttagtuuataaauaatgauauuatutatggtgagugtuatgattatautgaaataugtgtgttuattgatuautgtuatgtatatttttauttttaaaatttuttatatattutgtauaauttuttatautagatgtuaaauaaaaagttgataugtttuaatggaattgaugtuttuaatautgtatataagtaugatauttaggtutataaaatuttutaauugttaaauuaaattgtggaggaggtagaugatuaaatgtuutatggatatuuaaauaatggagagtuugataatguauagttttttgtuatggaggtttuuttttuuttutggggaatuuatttatatgtaaaauuuttuauutaaatttuutttttaaaagtugtutaaatutagtuaaaggaaauuutgugttuaaaaataatgtuugtuuagaatttugttttggatttgaatttguaugtugggggtgtaggtgggugtgtaguagaugttttgugtttttuuaattttttattgtgaaauauattaauauaatauaauaauaaaauaagauagatauatgaaauauaauaauauaauauaauaauaaauaaaaaauauatauauaatgttauatauaatauaauatauaatgauauaaauaaaatauauatgaauaaauauaugtauaagatauatgaauagtuaaaggauaaauauatatauaattattttgtaauauauataaauaatttgataaauatauatauaatauatatauuuauatggatatautuattuutuaauataaugaaugggatgggaugtaaugttauatggatggaaataaagggatataaauatuatggatgtauaaatuataaugaaatggaaaautgtatgatuauaggtataauatgttaaaggaggtaaaauatauggattgguaaaaguuaatgaauugtatgtatgggatautgtaauugtuttgtuaattaggaaaagaaaggaugtgauauaaauagauatgaaugaugtaauugtatgtatgggatautgtaauugtuttgtuaattaggaaaagaaaggaugtgauauaaauagauatgaaugaugtaautgagtatatatgtaugtuaugttaaugttttatgaattaauatgattatuaaatgtgtaugaaaatuugtgtataaaaatgaaatgaaagtttggaattuaugtuaaaauugaatgtgttaaugaaauatauggtttgatauggaauattttuautuagtgatggauaaataatggtuuauauutgattgguaaaatuuagtataauuagtaaatattagaaaatatattat

SEQ ID NO: 636 - DNA, 7909 bp, Papilloma virus
tatttgatattatggtttaaaatttttttattttatattggtttttgttaagttggtttttgttatgtatatattttgtttgtaaaatgttattttatgatgtgttgatataaagttttgtgatttttttttggtgtttgtaatgtattaaatatggtttgtaatttttgttgatatgtgttgtaatttgatgttatgtattttatgttttttggaaatgttgttagattttatatattaaaatgtaaatgtttaaattgttaatatatatttttttttttaggtaaattttatatatttgatataaatgttaagaatagattttaattatttatatttgtaatattaataagatatatatttttatgtaattttgtttgttaattttttggaaatttattttataattaatttatataatatatagtttttggaaatataggagtttttttttttgttgtatatttaaatttgtttgttaaagtattataaagtttagtaatttgttttgtgatatgttgtataatttttagggttgtatttttttgatgtgatattgtatatttttgtggtatttttttgtgtttggttgtaatttttttatataaaatttaaatataggatttggttgattggatatgatgatatttgttaatttattgttgagtttatttttatttttgaatttggttggtttatttgtttgtgttggttggtgttgattaatgatgtaatattggataatagtgtgaatattgtggtgttaagtaaatatatagttgttatgttgtttattggatgtttggtatgttgttgatgaatatttgtgttatttataatatatgggatggatatgtgttgttatttgtagtagatgttattggttaggatttttatgtttattttgattttattttatatgattaattaaattttatttttgttagtatttttttttttgttttttattataaagttttttatttttattttgttgtttattgttattgtgtttaaatgattttaaatatttattaagatattttttattatatgtttgtttgtgtttttgttgggtttgtaataaattatatgtttttttttttttattaaatttatgatatatatgtgattttgtttttaaatggtgtataagtgttttatgatgttttttgtaataattagtatgatgtttgggtatattttgtagataattatttttattttttatgtgtatgttttttgttttttatttatttgattttttgttgtttatattgttatgattttatttttgagttgtttattatgttgtttattttttagttttattgttgtgtttgaatttattgaattttagattattttattttttattaagtttttatttgatattttgtttatatttattgatatttttataatgtaatgttttttaattattataagatgtattattattatgtttttgtttatataatatatttaaatttttttggatattttatttaaaatattttaattattttggtaaatttttattattttgtttgatatgtttaattatatattgttttatattttaattaggtagttattgttttttaaatttttataattaatttgttgtattaaatatatgagtaaatgttataaattgaatgttatttttttattattataataataattaatttaaatttatattgtttttgtttaattgttattgttttgattatttattaaataatagttatggattttgtatatattaatattttggtggttttaatgttttggtttgtatatgtaatataattaaattttgttgttatagtttgtaattattatatgttttatgttgtggatttatttatttatttgattgataaaatgttgtattgaaattattattatataaattaaatttattttattatgttatttgtatattattgtttaattgtttgttattattgtaatgtataataatatgtgttgaatgtttaagtttattattatgatgatgtaaaaattttttattgagtgtttgtttttattattttttgatattttattatatatttgtaatatttttttgtttttttgtattttatagttattttgttatttatgttttatttatatttttttgtttattattttttttaatttttggttattatgttaataattttatagttttgtaatttaaatgttgtaaaaatttatgtaaattttttaaaaattttttatatggtttttttttgatatatgattaaatatttggttgtttatgtttttttagtataaaattttatttaaattatgttaaaaatttttttatataatatagtatatatttaagatttttagtgaaaattaatgttggtaatagtttatgtttttatttttattatttattatattgtggttatttaatttgtatatatttattaatgtattttttatgtaatttatttttattttaaagttatttatattttgtattttgtaattatgttaattttataggtggtgatgaagaatggagtttatgtttatgtttgtgtttgagatttattggtataaatgtattatttaattgttataaatttaaatttttaggtaagggtaaattatttttattattgggttatatatgttatttattatttttaatttttaggaaaaagagtttttgtattatgtttaatttaaattattttttttttttgttttttttggtattttttttatagttgtgtaaatttatgttatgtttttttttatgatttagaaatgttttgattattttgattaaatggtagtgtttaatttgtaatttttgattatgtgtattttatatgaaataatatatgttggtttgtttattttaaaagtgtaaatatggtggtttattatggaagaaataattgtagtttttggttttgtaaagtttattaatttgatgtttattgtaatttttgtaatttatttagtgttatattatgtttggttatttgtaatgttgtttgtttgaatttttatattgaaatatttggtggttttataaaattttttgtttttttttgttattgatatgttatattgttattgttttttttatgttatttaatatgtttgattttattttatatataatatttttttttatgtatatgatattaatgttttttttatttaatatatttatatataatatatgtattgatatttttttatataaaatttataaaattttttttatgatgttttataagattttgtgtttatattttttatgtatatttattagtttattaataaataggatgtagatatagattgttggtttataggtgatgattttgatgattgtatgtttgtttgttgttattggttggtggtgtttgttgttggtttgttgttgttggatgtttgtggtgtttgtggtgggttggggaatgttttgataagatatgtttggggtggaatttgttattttgttgtgtatgatgttgattgatgtgtttgtttgttgtttgatatatattaagattgtaatgtggatattatgtaaattttttatttagtttattaaattttataaattttatgtttaattttggaatattttttaatatattaagatatagtaggtggattgtaatttggttattgttgtttttattatttttattttaatattgatattgtaaatattgatttgttgttgttgtttataaaaatttatggtatttttatggtggatgatatgtttatttatgatttaaatattgtaatatttatatgtagtgtttggttatatatgatgattaatatatattggtattataaataaaaatataatataaaatataataaaaatatgaataggaataataatgtaggaaattatgaaaggtaaagatggatatgaattaatgattataattataatgatgaaatttataaatattttagaggaaatttttaaaaaaaaatgataaataataaaaatataaatggttattatatataattaaaagtatgtgttgtatattgtgttgtttttattatatatatgtatatatataataaatatatatatatgtgtattattataaaattgtaataataataataaaattaaaaaaaaaaaaatataatgattatttatggaaatataaaattgttatataataatattttgtgtttgttagatgttttgtgtttgtatgtagatgttgtgttgatatggtttgtatgttttggtgtttgtggatgggtgggttataataaggattttatttttttttatggtattgtttagtttaagaatttatattgttaaatttttaaaaaaaattattaaatttataattgtgtttgagattaagtttatttttttgattgatatatggataattatgattgggtggatgttgatgttaggggaatgttggatatgtaggaggttaatgatatttgtgataatttggaaatttgagtagatattatagtaattattttttttgtttaaaatatttttgtttatgtggttggggtagataaggatgtggtagtttaaaattataatgatgtagatgtttatgatgtggatgttaataattataaagtagataattttttagtagataagtttgataaagatgtgtaaatttagggtgtaaatgatttggtagatatgatgtgggaggttgtggatgtttttggagatttgtaaaatataaaagaaggggatgataattgtgtgttttaatatttttgtatggttatttatggaaataataaaggtgtttgttattattatattgtagtttgtgtgggtaaggttttagagtgggatattgtgtggaattaaatatattagtgttatgggttgtttaattttaataattgggatgaaaaaattgtagtggagtatttgaatattgtatattattaggatgtaaatttttgaaattgggatttttgtgtaatgttaaagttgtattattatatagtggatgaggattaggattgaaagatttataataatgtaatgtatttggatgataatgtagagtatttgtatgatatgtaaaattattttatttagttttttggtgtgaattttgagtgttattatttgtttaattttgattttatgtaataatagttttaaatttaggataatatggaaatttggtgtggtatggtttatttgttatatttaatgttggaaatgtattatgaagatgtagtagaatattataattattattaaatatattataaatatgattgttatatttattatatgtgtggggttatgttgtgagtatgttatgtaaatgttgttgtgtatggttgttatatagatatggaaatttatgttttaaattatgaggataatatagattgggattatatggaaggggaaataaagggtgtagattgggtaaataaggataaagtggaaaaaaaggaaaattgtggtaataatatttgttatgattgaaataaaatgtaggattaataaaataaaatgtagtgtttgtatttgtaaaaggtataaaaaaatgtttataggtatattgttggattattttggtgttatatggatggaggatatggatatagattttaatagttgtgattatttatatatagagtgtgtttgtaaataataatatgattattaaggtttgaagaatgataattggtaggtataaaaagataatttttaggatgattgtgattttttaataattatgggttttatagtttgaatgttatattttaaaaattttaggtaaatggtttaggattatttaaatttaaaggattgtggaggaaaatattgggattatgtgttgttaattatatttgtatatatttggaattttatttattttttgttggtaatttgtaattgtatttattagtaggaaataatttgtttaaattattgtgattttggttattgtttataggatttgttggtttatgattattattttttataaataggtatttaatatttgtttgtgttaatataaatgaatttatatttggaggttgtttttttgtaattttatttttataatgaatatgattatgttgtggatggttattaataggtggaaattttgaatatttatgataataatttttattattatattatttgtgttttaaattaatgtatttaaaattttgtaatgtttgattatttttattataaggataattataaatattgttatgtatgtttataggtttaataaatttttattgattatttggaatattattattaaataaaaagaaagaagttgtatttgtttataaatattttgtgaaaaaattattttgattatgtaattttttttgataagggttattggatatgtaatttttaagtttttgatgatggagataagttttgttatgaaaaaaagggtgaggattatttagttattaatgaaggtttagagttaataaattatttggtataattgatgttgtatgtgttttagtattattattataaataattttgttagtttataaataatgatattatttatggtgagtgttatgattatattgaaatatgtgtgtttattgattattgttatgtatatttttatttttaaaattttttatatattttgtataattttttatattagatgttaaataaaaagttgatatgttttaatggaattgatgtttttaatattgtatataagtatgatatttaggtttataaaattttttaattgttaaattaaattgtggaggaggtagatgattaaatgttttatggatatttaaataatggagagtttgataatgtatagttttttgttatggaggtttttttttttttttggggaatttatttatatgtaaaattttttatttaaattttttttttaaaagttgtttaaatttagttaaaggaaattttgtgtttaaaaataatgtttgtttagaattttgttttggatttgaatttgtatgttgggggtgtaggtgggtgtgtagtagatgttttgtgtttttttaattttttattgtgaaatatattaatataatataataataaaataagatagatatatgaaatataataatataatataataataaataaaaaatatatatataatgttatatataatataatatataatgatataaataaaatatatatgaataaatatatgtataagatatatgaatagttaaaggataaatatatatataattattttgtaatatatataaataatttgataaatatatatataatatatatatttatatggatatatttattttttaatataatgaatgggatgggatgtaatgttatatggatggaaataaagggatataaatattatggatgtataaattataatgaaatggaaaattgtatgattataggtataatatgttaaaggaggtaaaatatatggattggtaaaagttaatgaattgtatgtatgggatattgtaattgttttgttaattaggaaaagaaaggatgtgatataaatagatatgaatgatgtaattgtatgtatgggatattgtaattgttttgttaattaggaaaagaaaggatgtgatataaatagatatgaatgatgtaattgagtatatatgtatgttatgttaatgttttatgaattaatatgattattaaatgtgtatgaaaatttgtgtataaaaatgaaatgaaagtttggaatttatgttaaaattgaatgtgttaatgaaatatatggtttgatatggaatatttttatttagtgatggataaataatggtttatatttgattggtaaaatttagtataattagtaaatattagaaaatatattat

SEQ ID NO: 637 - DNA, 7851 bp, Papilloma virus
ccctataaaaaaaacagggagtgaccgaaaacggtcgtaccgaaaacggttgccataaaagcagaagtgcacaaaaaagcagaagtggacagacattgtaaggtgcggtatgtttcaggacccagctgaacgaccttacaaactgcatgatttgtgcaacgaggtagaagaaagcatccatgaaatttgtttgaattgtgtatactgcaaacaagaattacagcggagtgaggtatatgactttgcatgctatgatttgtgtatagtatatagagaaggccagccatatggagtatgcatgaaatgtttaaaattttattcaaaaataagtgaatatagatggtatagatatagtgtgtatggagaaacgttagaaaaacaatgcaacaaacagttatgtcatttattaattaggtgtattacatgtcaaaaaccgctgtgtccagttgaaaagcaaagacatttagaagaaaaaaaacgattccataacatcggtggacggtggacaggtcggtgtatgtcctgttggaaaccaacacgtagagaaaccgaggtgtaatcatgcatggagaaataactacattgcaagactatgttttagatttggaacccgaggcaactgacctatactgttatgagcaattgtgtgacagctcagaggaggaggaagatactattgacggtccagctggacaagcaaaaccagacacctccaattataatattgtaacgtcctgttgtaaatgtgaggcgacactacgtctgtgtgtacagagcacacacattgacatacgtaaattggaagatttattaatgggcacatttggaatagtgtgccccggctgttcacagagagcataatctacaatggctgatcctgcaggtacagatgaaggggaggggacgggatgtaatggatggttttttgtagaagcagtagttagtagacgtacgggatccagtgtagaggacgaaaatgaagatgactgtgacaggggggaggatatggtggactttataaatgatacagatatattaaacatacaggcagaaacagagacagcacaagcattatttcatgcacaggaggagcaaacacacaaagaggctgtacaggtcctaaaacgaaagtatgctagtagtccacttagcagcgtgagcttatgtgttaataataacataagtccacgtttaaaagctatttgcattgaaaataaaaatacagcagcaaagcgacgattatttgaactaccagacagcggttatggcaattctgaagtggaaatacacgagatacaacaggtagaggggcatgatacagttgaacaatgtagtatgggcagtggggatagtataacctctagtagcgatgaaagacatgatgagactccaacgcgagacataatacaaatactaaaatgtagtaatgcaaacgcagctatgttggctaaatttaaagaactatttggtattagttttacagaacttattagaccatttaagagtgataaatccacatgtacagattggtgtgtggccgcatttggaatagccccaagtgtggcgaactttaaacatataacatatgtatacatatacaatgtttatcgtgttcatggggctatggtaattctagcattattacgatttaaagtcgaaaaacgagaacaacaattgaaaactattgatgctaaattgctatgtatttcagctgcaagtatgctaatacaaccaccaaaattacgtagtaccccagctgcgttatattggtttaaaacagcaatgtcaaatattagtgaggttgatggagaaacaccagaatggattcaaagacaaacagtattacagcatagttttaatgatgcaatatttgacctatctgaaatggtacaatgggcatatgacaatgattttatagatgatagtgatatagcatataaatatgcacaattggcagaaactaatagtaatgcatgtgcttttttaaaaagtaattcgcaagctaaaattgtaaaagattgtgcaacaatgtgtagacattataaacgagctgaaaaaagagaaatgacaatgtcacagtggattaaaaggcgatgtgcacaggtggacgatgacggtgactggagggacatagtacgatttttaagatatcaacaagtagattttgtggcatttttatctgcactaaaaaattttttacatggtgtgcctaaaaaaaattgcatactaatatatggagcaccaaacacaggtaaatcattatttggaatgagtctaatgcatttcttacaaggagctattatatcctatgtaaattctaaaagccatttttggttgcagccattatatgatgccaaaatagctatgttagatgatgctacatcgccatgtggcatatatagaccaatatttaagaaatgcactagatggaaatcctatatttcatttagatgtaaagcattaagcatagtgcatataatgcccacctttacttattacatcaatataaatgcaggcaaagatgacaggtggccatacttacatagcagggtagtggtctttacatttcacaatgaattcccatttgataaaaatggaaacccagagtatgggcttaatgataaaaactggaaatcctttttctcaaggacgtggtgcagattaaatttgcacgaggaagaggtcaaagaaaatgatggagacgctttcccagcgtttaagtgtgtgtcaggacaaaatactagaacattacgagactgatagcacatgtttgtctgatcacatacagtattggaaactgattcgtcttgaatgtgcagtattttataaagcaagagaaatgggaattaaaactcttaaccaccaagtggttccaacgcaggccatttcaaaagccaaagcaatgcaagcaattgaactgcaattaatgttagagacattaaatacaactgagtatagcacagaggactggacactgcaagaaacaagtattgaactatatacaacagttcctacaagatgtttaaaaaaagatgtttatactgtggaagcacaatttgatggtgataaacaaaatactatgcattatactaattggacacatatatatatattagaggacagtatatgtactgttgtaaagggactggtaaattataaaggtatttattatgtgcatcagggtgtagaaacatattatgttacttttagggaagaggctaaaaagtatggaaaaaaaaatatatgggaagtgcatgtgggtggtcaggtaattgtttgtcctgaatctgtatttagcagcacagaactatccactgctgaaattgctacacagctacacgcctacaacaccaccgagacccataccaaagcctgctccgtgggcaccacagaaacccagaagacaaatcacaaacgacttcgagggggtaccgagctcccctacaaccccaccaagcgagtgcgactcagtgccgtggacagtgttgacagaggggtctactctacatctgactgcacaaacaaagaccggtgtggtagttgtagtacaactacacctatagtacatttaaaaggtgatgcaaatacattaaagtgttcaagatatagattgggtaaatataaagcattgtatcaagatgcttcatctacatggagatggacatgtacaaacgataaaaaacaaatagcaattgtaacattaacttacacaacagaatatcaaagggataaatttttaactacagtaaaaatacctaacacagttacagtgtctaaaggatatatgtctatatgatagaccttacagcttccagtactgtgttgctgtgctttttgttgtgcttttgtgtgcttttgtgcttgtgtctgcttgtacgttcgctattgctatctgtgtcattatactcagcattaatattactggttttaatactgtgggttactgtagcaacaccactacttgcttttgttgtttcttgcttttgtatatacctatggatgattaacgctcatgcacaatatttggcagtacagtaattgtatacaaacattgtgtttggtactgtgtaacatgtgtgtatggtggttttattttttgttgttcattgtatattttgtttttttactgtttttaaacatttttatttctgtgtttttaataaattgatcacatggtataaccatgcgacacaaaaggtctacaaaacgtgttaaacgtgcatctgcaacacaactatatcgtacttgcaaagctgcaggaacttgtccaccagatgttatacctaaggttgagggtaatactgttgctgatcaaattttaaaatatggcagcatggctgtgttttttggggggttaggaattggttctggatctggcacaggtggaagatctggatatgttccactgggtacaacacctccaacggctgccacaaacattcctatacgaccccctgtaactgtggaaagtataccattagacacaattggccctttagattcttctatagtgtcattagtagaggaaactagttttattgagtctggtgcccctgttgttacaccaagggtcccacctacaacaggttttacaataaccacatctacagataccacacctgctattttagatgtgacatccataagtacacatgataatcctactttcactgatccttctgttttacacccacccacgcctgcagaaacttcaggtcattttgtactttcatcatcttctattagtacacataattatgaagaaatccctatggatacttttattgtttccacagacagcaataatataactaatagcacgcctattccagggtctcgccctacgacacgcctaggattatatagtaaaggtacccagcaggttaaggttgttgaccctgcctttatgacttctcctgcaaaacttattacatatgataatcctgcatatgaaggccttaaccctgatacaaccttacaatttgagcatgaggatattagcttagctccggatcctgactttatggacattatagctttacataggcctgcactaacatctaggaaaggcactattagatatagtagagtaggtaataaacgtactatgcatacacgaagtggaaaagctataggggcacgggtacattattatcaggatttaagtagtattactgaagatatagaattacaacccttacaacatgtaccatcctctttaccacataccactgtttcaacatcattaaatgatggtatgtttgatatttatgctcctatagatactgaggaagatattatattttcagcatcttctaacaatactttatatactacatctaacactgcatatgttcctagcaatactactataccattaagtagtggctatgatattcctataacagcagggccagacattgtatttaactctaatactattactaactctgtactaccggtacccacaggtcctatatattctattattgcagatgggggtgacttttatttacaccctagttattatttattaaaacgacgtcgtaaagctatcccatatttttttgcagatgtctctgtggcggtctaacgaagccactgtctacctgcctccagtgtcagtgtctaaggttgttagcactgatgaatatgtaacacgcacaaacatctactatcatgcaggcagttctaggctattagctgtgggtcacccatactatgctattaaaaaacaagattctaataaaatagcagtacccaaggtatctggtttgcaatacagagtatttagagtaaaattaccagatcctaataagtttggatttccagacacatcattttatgatccctgcctccagcgtttggtttgggcctgtacaggagttgaagtaggtcgtggtcagccattaggagtaggtattagtggtcatcctttattaaataaattggatgatactgaaaatcttaataaatatgttggtaactctggtaactctggtacagataacagggaatgcatttctatggattataaacaaacacaattgtgtttaataggttgtaggcctcctataggtgaacattggggaaaaggcacaccttgtaatgctaaccaggtaaaagcaggagaatgtcctcctttggagttactaaacactgtactacaagacggggacatggtagacacaggatttggtgcaatggattttactacattacaagctaataaaagtgatgttcccctagatatatgcagttccatttgcaaatatcctgattatctaaaaatggtttctgagccatatggagatatgttatttttttatttacgtagggagcaaatgtttgttagacatttatttaatagggctggaactgtaggtgaaacagtacctgcagacctatatattaagggtaccactggcacattgcctagtactagttattttcctactcctagtggctctatggtaacctccgatgcacaaatatttaataaaccatattggttgcaacgtgcacaaggccataataatggtatttgttggagtaaccaattgtttgttactgtagttgatacaacccgtagtacaaatatgtctgtgtgttctgctgtgtcttctagtgacagtacatataaaaatgacaattttaaggaatatttaaggcatggtgaagaatatgatttacagtttatttttcagttatgtaaaataacactaacagcagatgttatgacatatattcatagtatgaacccgtccattttagaggattggaattttggccttacaccaccgccttctggtaccttagaggacacatatcgctatgtaacatcacaggctgtaacttgtcaaaaacccagtgcaccaaaacctaaagatgatccattaaaaaattatactttttgggaggttgatttaaaggaaaagttttctgcagacttagatcagtttccgttgggccgtaaatttttgttacaagcaggactaaaggccaggcctaattttagattaggcaggcgtgcagctccagcatctacatctaaaaaatcttctactaaacgtagaaaagtaaaaagttaatgtgtaaatgtgtatgcatgtatactgtgtgttatgtgttgtagtgcttgtatatatattatgtgttgtggtgcctgtttgtgttgtacatggcgtgtaaatgtgtgtataatattgtgcaatgtgttgtacgtgggtgtttttgtacttagtgtgtagtagttcagtagccataaagtgatgtgtgtgtttataattaacactgtattgttgtatgactatggtgcaccgatatgagcttacataattacatgacagctatattgtgtatataaataatctacctccattttgtgtgttagtgtcctttacattacctttcaaccgatttcggttgctgttggtaagctttatatgttttttacaaaaacattcctacctcagcagaacacttaatccttgtgttcctgatatatattgtttgccaactttatattggcttttgccaatctttaaacttgattcatcttgcagtattagtcatttttcatacttgtggtccacccacacttgtaacacttgtaacagtgcttttaggcacatattttttgcatttctaaagggctttaattgcacaccttggctttacatattatgtgtgtttgccaacaccaccctacacatcctgccaactttaagttaaaacatgcatgtaaaacattactcactgtattacacattgttatatgcacacaggtgtgtccaaccgatttggattacagttttataagcatttctttttattatagttagtaacaat

SEQ ID NO: 638 - DNA, 7851 bp, Papilloma virus
uuutataaaaaaaauagggagtgauugaaaauggtugtauugaaaauggttguuataaaaguagaagtguauaaaaaaguagaagtggauagauattgtaaggtguggtatgtttuaggauuuagutgaaugauuttauaaautguatgatttgtguaaugaggtagaagaaaguatuuatgaaatttgtttgaattgtgtatautguaaauaagaattauaguggagtgaggtatatgautttguatgutatgatttgtgtatagtatatagagaagguuaguuatatggagtatguatgaaatgtttaaaattttattuaaaaataagtgaatatagatggtatagatatagtgtgtatggagaaaugttagaaaaauaatguaauaaauagttatgtuatttattaattaggtgtattauatgtuaaaaauugutgtgtuuagttgaaaaguaaagauatttagaagaaaaaaaaugattuuataauatuggtggauggtggauaggtuggtgtatgtuutgttggaaauuaauaugtagagaaauugaggtgtaatuatguatggagaaataautauattguaagautatgttttagatttggaauuugagguaautgauutatautgttatgaguaattgtgtgauagutuagaggaggaggaagatautattgauggtuuagutggauaaguaaaauuagauauutuuaattataatattgtaaugtuutgttgtaaatgtgaggugauautaugtutgtgtgtauagaguauauauattgauataugtaaattggaagatttattaatggguauatttggaatagtgtguuuuggutgttuauagagaguataatutauaatggutgatuutguaggtauagatgaaggggaggggaugggatgtaatggatggttttttgtagaaguagtagttagtagaugtaugggatuuagtgtagaggaugaaaatgaagatgautgtgauaggggggaggatatggtggautttataaatgatauagatatattaaauatauagguagaaauagagauaguauaaguattatttuatguauaggaggaguaaauauauaaagaggutgtauaggtuutaaaaugaaagtatgutagtagtuuauttaguagugtgaguttatgtgttaataataauataagtuuaugtttaaaagutatttguattgaaaataaaaatauaguaguaaagugaugattatttgaautauuagauaguggttatgguaattutgaagtggaaatauaugagatauaauaggtagagggguatgatauagttgaauaatgtagtatggguagtggggatagtataauututagtagugatgaaagauatgatgagautuuaaugugagauataatauaaatautaaaatgtagtaatguaaauguagutatgttggutaaatttaaagaautatttggtattagttttauagaauttattagauuatttaagagtgataaatuuauatgtauagattggtgtgtgguuguatttggaataguuuuaagtgtggugaautttaaauatataauatatgtatauatatauaatgtttatugtgttuatggggutatggtaattutaguattattaugatttaaagtugaaaaaugagaauaauaattgaaaautattgatgutaaattgutatgtatttuagutguaagtatgutaatauaauuauuaaaattaugtagtauuuuagutgugttatattggtttaaaauaguaatgtuaaatattagtgaggttgatggagaaauauuagaatggattuaaagauaaauagtattauaguatagttttaatgatguaatatttgauutatutgaaatggtauaatggguatatgauaatgattttatagatgatagtgatataguatataaatatguauaattgguagaaautaatagtaatguatgtguttttttaaaaagtaattuguaagutaaaattgtaaaagattgtguaauaatgtgtagauattataaaugagutgaaaaaagagaaatgauaatgtuauagtggattaaaaggugatgtguauaggtggaugatgauggtgautggagggauatagtaugatttttaagatatuaauaagtagattttgtgguatttttatutguautaaaaaattttttauatggtgtguutaaaaaaaattguatautaatatatggaguauuaaauauaggtaaatuattatttggaatgagtutaatguatttuttauaaggagutattatatuutatgtaaattutaaaaguuatttttggttguaguuattatatgatguuaaaatagutatgttagatgatgutauatuguuatgtgguatatatagauuaatatttaagaaatguautagatggaaatuutatatttuatttagatgtaaaguattaaguatagtguatataatguuuauutttauttattauatuaatataaatguagguaaagatgauaggtgguuatauttauataguagggtagtggtutttauatttuauaatgaattuuuatttgataaaaatggaaauuuagagtatggguttaatgataaaaautggaaatuutttttutuaaggaugtggtguagattaaatttguaugaggaagaggtuaaagaaaatgatggagaugutttuuuagugtttaagtgtgtgtuaggauaaaatautagaauattaugagautgataguauatgtttgtutgatuauatauagtattggaaautgattugtuttgaatgtguagtattttataaaguaagagaaatgggaattaaaaututtaauuauuaagtggttuuaauguagguuatttuaaaaguuaaaguaatguaaguaattgaautguaattaatgttagagauattaaatauaautgagtataguauagaggautggauautguaagaaauaagtattgaautatatauaauagttuutauaagatgtttaaaaaaagatgtttatautgtggaaguauaatttgatggtgataaauaaaatautatguattatautaattggauauatatatatatattagaggauagtatatgtautgttgtaaagggautggtaaattataaaggtatttattatgtguatuagggtgtagaaauatattatgttauttttagggaagaggutaaaaagtatggaaaaaaaaatatatgggaagtguatgtgggtggtuaggtaattgtttgtuutgaatutgtatttaguaguauagaautatuuautgutgaaattgutauauagutauauguutauaauauuauugagauuuatauuaaaguutgutuugtggguauuauagaaauuuagaagauaaatuauaaaugauttugagggggtauugagutuuuutauaauuuuauuaagugagtgugautuagtguugtggauagtgttgauagaggggtutaututauatutgautguauaaauaaagauuggtgtggtagttgtagtauaautauauutatagtauatttaaaaggtgatguaaatauattaaagtgttuaagatatagattgggtaaatataaaguattgtatuaagatguttuatutauatggagatggauatgtauaaaugataaaaaauaaataguaattgtaauattaauttauauaauagaatatuaaagggataaatttttaautauagtaaaaatauutaauauagttauagtgtutaaaggatatatgtutatatgatagauuttauaguttuuagtautgtgttgutgtgutttttgttgtguttttgtgtguttttgtguttgtgtutguttgtaugttugutattgutatutgtgtuattatautuaguattaatattautggttttaatautgtgggttautgtaguaauauuautauttguttttgttgtttuttguttttgtatatauutatggatgattaaugutuatguauaatatttgguagtauagtaattgtatauaaauattgtgtttggtautgtgtaauatgtgtgtatggtggttttattttttgttgttuattgtatattttgtttttttautgtttttaaauatttttatttutgtgtttttaataaattgatuauatggtataauuatgugauauaaaaggtutauaaaaugtgttaaaugtguatutguaauauaautatatugtauttguaaagutguaggaauttgtuuauuagatgttatauutaaggttgagggtaatautgttgutgatuaaattttaaaatatgguaguatggutgtgttttttggggggttaggaattggttutggatutgguauaggtggaagatutggatatgttuuautgggtauaauauutuuaauggutguuauaaauattuutataugauuuuutgtaautgtggaaagtatauuattagauauaattgguuutttagattuttutatagtgtuattagtagaggaaautagttttattgagtutggtguuuutgttgttauauuaagggtuuuauutauaauaggttttauaataauuauatutauagatauuauauutgutattttagatgtgauatuuataagtauauatgataatuutautttuautgatuuttutgttttauauuuauuuauguutguagaaauttuaggtuattttgtautttuatuatuttutattagtauauataattatgaagaaatuuutatggatauttttattgtttuuauagauaguaataatataautaataguauguutattuuagggtutuguuutaugauauguutaggattatatagtaaaggtauuuaguaggttaaggttgttgauuutguutttatgauttutuutguaaaauttattauatatgataatuutguatatgaagguuttaauuutgatauaauuttauaatttgaguatgaggatattaguttagutuuggatuutgautttatggauattatagutttauatagguutguautaauatutaggaaagguautattagatatagtagagtaggtaataaaugtautatguatauaugaagtggaaaagutatagggguaugggtauattattatuaggatttaagtagtattautgaagatatagaattauaauuuttauaauatgtauuatuututttauuauatauuautgtttuaauatuattaaatgatggtatgtttgatatttatgutuutatagatautgaggaagatattatattttuaguatuttutaauaatautttatatautauatutaauautguatatgttuutaguaatautautatauuattaagtagtggutatgatattuutataauaguaggguuagauattgtatttaaututaatautattautaaututgtautauuggtauuuauaggtuutatatattutattattguagatgggggtgauttttatttauauuutagttattatttattaaaaugaugtugtaaagutatuuuatatttttttguagatgtututgtgguggtutaaugaaguuautgtutauutguutuuagtgtuagtgtutaaggttgttaguautgatgaatatgtaauauguauaaauatutautatuatguagguagttutaggutattagutgtgggtuauuuatautatgutattaaaaaauaagattutaataaaataguagtauuuaaggtatutggtttguaatauagagtatttagagtaaaattauuagatuutaataagtttggatttuuagauauatuattttatgatuuutguutuuagugtttggtttggguutgtauaggagttgaagtaggtugtggtuaguuattaggagtaggtattagtggtuatuutttattaaataaattggatgatautgaaaatuttaataaatatgttggtaaututggtaaututggtauagataauagggaatguatttutatggattataaauaaauauaattgtgtttaataggttgtagguutuutataggtgaauattggggaaaagguauauuttgtaatgutaauuaggtaaaaguaggagaatgtuutuutttggagttautaaauautgtautauaagauggggauatggtagauauaggatttggtguaatggattttautauattauaagutaataaaagtgatgttuuuutagatatatguagttuuatttguaaatatuutgattatutaaaaatggtttutgaguuatatggagatatgttatttttttatttaugtagggaguaaatgtttgttagauatttatttaatagggutggaautgtaggtgaaauagtauutguagauutatatattaagggtauuautgguauattguutagtautagttattttuutautuutagtggututatggtaauutuugatguauaaatatttaataaauuatattggttguaaugtguauaagguuataataatggtatttgttggagtaauuaattgtttgttautgtagttgatauaauuugtagtauaaatatgtutgtgtgttutgutgtgtuttutagtgauagtauatataaaaatgauaattttaaggaatatttaagguatggtgaagaatatgatttauagtttatttttuagttatgtaaaataauautaauaguagatgttatgauatatattuatagtatgaauuugtuuattttagaggattggaattttgguuttauauuauuguuttutggtauuttagaggauauatatugutatgtaauatuauaggutgtaauttgtuaaaaauuuagtguauuaaaauutaaagatgatuuattaaaaaattatautttttgggaggttgatttaaaggaaaagttttutguagauttagatuagtttuugttggguugtaaatttttgttauaaguaggautaaagguuagguutaattttagattagguaggugtguagutuuaguatutauatutaaaaaatuttutautaaaugtagaaaagtaaaaagttaatgtgtaaatgtgtatguatgtatautgtgtgttatgtgttgtagtguttgtatatatattatgtgttgtggtguutgtttgtgttgtauatggugtgtaaatgtgtgtataatattgtguaatgtgttgtaugtgggtgtttttgtauttagtgtgtagtagttuagtaguuataaagtgatgtgtgtgtttataattaauautgtattgttgtatgautatggtguauugatatgaguttauataattauatgauagutatattgtgtatataaataatutauutuuattttgtgtgttagtgtuutttauattauutttuaauugatttuggttgutgttggtaagutttatatgttttttauaaaaauattuutauutuaguagaauauttaatuuttgtgttuutgatatatattgtttguuaautttatattgguttttguuaatutttaaauttgattuatuttguagtattagtuatttttuatauttgtggtuuauuuauauttgtaauauttgtaauagtguttttagguauatattttttguatttutaaagggutttaattguauauuttggutttauatattatgtgtgtttguuaauauuauuutauauatuutguuaautttaagttaaaauatguatgtaaaauattautuautgtattauauattgttatatguauauaggtgtgtuuaauugatttggattauagttttataaguatttutttttattatagttagtaauaat

SEQ ID NO: 639 - DNA, 7851 bp, Papilloma virus
ttttataaaaaaaatagggagtgattgaaaatggttgtattgaaaatggttgttataaaagtagaagtgtataaaaaagtagaagtggatagatattgtaaggtgtggtatgttttaggatttagttgaatgattttataaattgtatgatttgtgtaatgaggtagaagaaagtatttatgaaatttgtttgaattgtgtatattgtaaataagaattatagtggagtgaggtatatgattttgtatgttatgatttgtgtatagtatatagagaaggttagttatatggagtatgtatgaaatgtttaaaattttatttaaaaataagtgaatatagatggtatagatatagtgtgtatggagaaatgttagaaaaataatgtaataaatagttatgttatttattaattaggtgtattatatgttaaaaattgttgtgtttagttgaaaagtaaagatatttagaagaaaaaaaatgattttataatattggtggatggtggataggttggtgtatgttttgttggaaattaatatgtagagaaattgaggtgtaattatgtatggagaaataattatattgtaagattatgttttagatttggaatttgaggtaattgatttatattgttatgagtaattgtgtgatagtttagaggaggaggaagatattattgatggtttagttggataagtaaaattagatatttttaattataatattgtaatgttttgttgtaaatgtgaggtgatattatgtttgtgtgtatagagtatatatattgatatatgtaaattggaagatttattaatgggtatatttggaatagtgtgttttggttgtttatagagagtataatttataatggttgattttgtaggtatagatgaaggggaggggatgggatgtaatggatggttttttgtagaagtagtagttagtagatgtatgggatttagtgtagaggatgaaaatgaagatgattgtgataggggggaggatatggtggattttataaatgatatagatatattaaatatataggtagaaatagagatagtataagtattattttatgtataggaggagtaaatatataaagaggttgtataggttttaaaatgaaagtatgttagtagtttatttagtagtgtgagtttatgtgttaataataatataagtttatgtttaaaagttatttgtattgaaaataaaaatatagtagtaaagtgatgattatttgaattattagatagtggttatggtaattttgaagtggaaatatatgagatataataggtagaggggtatgatatagttgaataatgtagtatgggtagtggggatagtataatttttagtagtgatgaaagatatgatgagattttaatgtgagatataatataaatattaaaatgtagtaatgtaaatgtagttatgttggttaaatttaaagaattatttggtattagttttatagaatttattagattatttaagagtgataaatttatatgtatagattggtgtgtggttgtatttggaatagttttaagtgtggtgaattttaaatatataatatatgtatatatatataatgtttattgtgtttatggggttatggtaattttagtattattatgatttaaagttgaaaaatgagaataataattgaaaattattgatgttaaattgttatgtattttagttgtaagtatgttaatataattattaaaattatgtagtattttagttgtgttatattggtttaaaatagtaatgttaaatattagtgaggttgatggagaaatattagaatggatttaaagataaatagtattatagtatagttttaatgatgtaatatttgatttatttgaaatggtataatgggtatatgataatgattttatagatgatagtgatatagtatataaatatgtataattggtagaaattaatagtaatgtatgtgtttttttaaaaagtaatttgtaagttaaaattgtaaaagattgtgtaataatgtgtagatattataaatgagttgaaaaaagagaaatgataatgttatagtggattaaaaggtgatgtgtataggtggatgatgatggtgattggagggatatagtatgatttttaagatattaataagtagattttgtggtatttttatttgtattaaaaaattttttatatggtgtgtttaaaaaaaattgtatattaatatatggagtattaaatataggtaaattattatttggaatgagtttaatgtattttttataaggagttattatattttatgtaaattttaaaagttatttttggttgtagttattatatgatgttaaaatagttatgttagatgatgttatattgttatgtggtatatatagattaatatttaagaaatgtattagatggaaattttatattttatttagatgtaaagtattaagtatagtgtatataatgtttatttttatttattatattaatataaatgtaggtaaagatgataggtggttatatttatatagtagggtagtggtttttatattttataatgaatttttatttgataaaaatggaaatttagagtatgggtttaatgataaaaattggaaatttttttttttaaggatgtggtgtagattaaatttgtatgaggaagaggttaaagaaaatgatggagatgtttttttagtgtttaagtgtgtgttaggataaaatattagaatattatgagattgatagtatatgtttgtttgattatatatagtattggaaattgatttgttttgaatgtgtagtattttataaagtaagagaaatgggaattaaaatttttaattattaagtggttttaatgtaggttattttaaaagttaaagtaatgtaagtaattgaattgtaattaatgttagagatattaaatataattgagtatagtatagaggattggatattgtaagaaataagtattgaattatatataatagtttttataagatgtttaaaaaaagatgtttatattgtggaagtataatttgatggtgataaataaaatattatgtattatattaattggatatatatatatatattagaggatagtatatgtattgttgtaaagggattggtaaattataaaggtatttattatgtgtattagggtgtagaaatatattatgttatttttagggaagaggttaaaaagtatggaaaaaaaaatatatgggaagtgtatgtgggtggttaggtaattgtttgttttgaatttgtatttagtagtatagaattatttattgttgaaattgttatatagttatatgtttataatattattgagatttatattaaagtttgttttgtgggtattatagaaatttagaagataaattataaatgattttgagggggtattgagtttttttataattttattaagtgagtgtgatttagtgttgtggatagtgttgatagaggggtttattttatatttgattgtataaataaagattggtgtggtagttgtagtataattatatttatagtatatttaaaaggtgatgtaaatatattaaagtgtttaagatatagattgggtaaatataaagtattgtattaagatgttttatttatatggagatggatatgtataaatgataaaaaataaatagtaattgtaatattaatttatataatagaatattaaagggataaatttttaattatagtaaaaatatttaatatagttatagtgtttaaaggatatatgtttatatgatagattttatagtttttagtattgtgttgttgtgttttttgttgtgtttttgtgtgtttttgtgtttgtgtttgtttgtatgtttgttattgttatttgtgttattatatttagtattaatattattggttttaatattgtgggttattgtagtaatattattatttgtttttgttgttttttgtttttgtatatatttatggatgattaatgtttatgtataatatttggtagtatagtaattgtatataaatattgtgtttggtattgtgtaatatgtgtgtatggtggttttattttttgttgtttattgtatattttgtttttttattgtttttaaatatttttatttttgtgtttttaataaattgattatatggtataattatgtgatataaaaggtttataaaatgtgttaaatgtgtatttgtaatataattatattgtatttgtaaagttgtaggaatttgtttattagatgttatatttaaggttgagggtaatattgttgttgattaaattttaaaatatggtagtatggttgtgttttttggggggttaggaattggttttggatttggtataggtggaagatttggatatgttttattgggtataatatttttaatggttgttataaatatttttatatgattttttgtaattgtggaaagtatattattagatataattggttttttagatttttttatagtgttattagtagaggaaattagttttattgagtttggtgtttttgttgttatattaagggttttatttataataggttttataataattatatttatagatattatatttgttattttagatgtgatatttataagtatatatgataattttatttttattgatttttttgttttatatttatttatgtttgtagaaattttaggttattttgtatttttattattttttattagtatatataattatgaagaaatttttatggatatttttattgtttttatagatagtaataatataattaatagtatgtttattttagggttttgttttatgatatgtttaggattatatagtaaaggtatttagtaggttaaggttgttgattttgtttttatgattttttttgtaaaatttattatatatgataattttgtatatgaaggttttaattttgatataattttataatttgagtatgaggatattagtttagttttggattttgattttatggatattatagttttatataggtttgtattaatatttaggaaaggtattattagatatagtagagtaggtaataaatgtattatgtatatatgaagtggaaaagttataggggtatgggtatattattattaggatttaagtagtattattgaagatatagaattataatttttataatatgtattattttttttattatatattattgttttaatattattaaatgatggtatgtttgatatttatgtttttatagatattgaggaagatattatatttttagtattttttaataatattttatatattatatttaatattgtatatgtttttagtaatattattatattattaagtagtggttatgatatttttataatagtagggttagatattgtatttaattttaatattattattaattttgtattattggtatttataggttttatatattttattattgtagatgggggtgatttttatttatattttagttattatttattaaaatgatgttgtaaagttattttatatttttttgtagatgtttttgtggtggtttaatgaagttattgtttatttgtttttagtgttagtgtttaaggttgttagtattgatgaatatgtaatatgtataaatatttattattatgtaggtagttttaggttattagttgtgggttatttatattatgttattaaaaaataagattttaataaaatagtagtatttaaggtatttggtttgtaatatagagtatttagagtaaaattattagattttaataagtttggatttttagatatattattttatgatttttgtttttagtgtttggtttgggtttgtataggagttgaagtaggttgtggttagttattaggagtaggtattagtggttattttttattaaataaattggatgatattgaaaattttaataaatatgttggtaattttggtaattttggtatagataatagggaatgtatttttatggattataaataaatataattgtgtttaataggttgtaggttttttataggtgaatattggggaaaaggtatattttgtaatgttaattaggtaaaagtaggagaatgtttttttttggagttattaaatattgtattataagatggggatatggtagatataggatttggtgtaatggattttattatattataagttaataaaagtgatgtttttttagatatatgtagttttatttgtaaatattttgattatttaaaaatggtttttgagttatatggagatatgttatttttttatttatgtagggagtaaatgtttgttagatatttatttaatagggttggaattgtaggtgaaatagtatttgtagatttatatattaagggtattattggtatattgtttagtattagttatttttttatttttagtggttttatggtaatttttgatgtataaatatttaataaattatattggttgtaatgtgtataaggttataataatggtatttgttggagtaattaattgtttgttattgtagttgatataatttgtagtataaatatgtttgtgtgttttgttgtgttttttagtgatagtatatataaaaatgataattttaaggaatatttaaggtatggtgaagaatatgatttatagtttattttttagttatgtaaaataatattaatagtagatgttatgatatatatttatagtatgaatttgtttattttagaggattggaattttggttttatattattgttttttggtattttagaggatatatattgttatgtaatattataggttgtaatttgttaaaaatttagtgtattaaaatttaaagatgatttattaaaaaattatattttttgggaggttgatttaaaggaaaagttttttgtagatttagattagtttttgttgggttgtaaatttttgttataagtaggattaaaggttaggtttaattttagattaggtaggtgtgtagttttagtatttatatttaaaaaattttttattaaatgtagaaaagtaaaaagttaatgtgtaaatgtgtatgtatgtatattgtgtgttatgtgttgtagtgtttgtatatatattatgtgttgtggtgtttgtttgtgttgtatatggtgtgtaaatgtgtgtataatattgtgtaatgtgttgtatgtgggtgtttttgtatttagtgtgtagtagtttagtagttataaagtgatgtgtgtgtttataattaatattgtattgttgtatgattatggtgtattgatatgagtttatataattatatgatagttatattgtgtatataaataatttatttttattttgtgtgttagtgttttttatattattttttaattgattttggttgttgttggtaagttttatatgttttttataaaaatatttttattttagtagaatatttaatttttgtgtttttgatatatattgtttgttaattttatattggtttttgttaatttttaaatttgatttattttgtagtattagttattttttatatttgtggtttatttatatttgtaatatttgtaatagtgtttttaggtatatattttttgtatttttaaagggttttaattgtatattttggttttatatattatgtgtgtttgttaatattattttatatattttgttaattttaagttaaaatatgtatgtaaaatattatttattgtattatatattgttatatgtatataggtgtgtttaattgatttggattatagttttataagtatttttttttattatagttagtaataat

SEQ ID NO: 640 - DNA, 7851 bp, Papilloma virus
gggatattttttttgtccctcactggcttttgccagcatggcttttgccaacggtattttcgtcttcacgtgttttttcgtcttcacctgtctgtaacattccacgccatacaaagtcctgggtcgacttgctggaatgtttgacgtactaaacacgttgctccatcttctttcgtaggtactttaaacaaacttaacacatatgacgtttgttcttaatgtcgcctcactccatatactgaaacgtacgatactaaacacatatcatatatctcttccggtcggtatacctcatacgtactttacaaattttaaaataagtttttattcacttatatctaccatatctatatcacacatacctctttgcaatctttttgttacgttgtttgtcaatacagtaaataattaatccacataatgtacagtttttggcgacacaggtcaacttttcgtttctgtaaatcttcttttttttgctaaggtattgtagccacctgccacctgtccagccacatacaggacaacctttggttgtgcatctctttggctccacattagtacgtacctctttattgatgtaacgttctgatacaaaatctaaaccttgggctccgttgactggatatgacaatactcgttaacacactgtcgagtctcctcctccttctatgataactgccaggtcgacctgttcgttttggtctgtggaggttaatattataacattgcaggacaacatttacactccgctgtgatgcagacacacatgtctcgtgtgtgtaactgtatgcatttaaccttctaaataattacccgtgtaaaccttatcacacggggccgacaagtgtctctcgtattagatgttaccgactaggacgtccatgtctacttcccctcccctgccctacattacctaccaaaaaacatcttcgtcatcaatcatctgcatgccctaggtcacatctcctgcttttacttctactgacactgtcccccctcctataccacctgaaatatttactatgtctatataatttgtatgtccgtctttgtctctgtcgtgttcgtaataaagtacgtgtcctcctcgtttgtgtgtttctccgacatgtccaggattttgctttcatacgatcatcaggtgaatcgtcgcactcgaatacacaattattattgtattcaggtgcaaattttcgataaacgtaacttttatttttatgtcgtcgtttcgctgctaataaacttgatggtctgtcgccaataccgttaagacttcacctttatgtgctctatgttgtccatctccccgtactatgtcaacttgttacatcatacccgtcacccctatcatattggagatcatcgctactttctgtactactctgaggttgcgctctgtattatgtttatgattttacatcattacgtttgcgtcgatacaaccgatttaaatttcttgataaaccataatcaaaatgtcttgaataatctggtaaattctcactatttaggtgtacatgtctaaccacacaccggcgtaaaccttatcggggttcacaccgcttgaaatttgtatattgtatacatatgtatatgttacaaatagcacaagtaccccgataccattaagatcgtaataatgctaaatttcagctttttgctcttgttgttaacttttgataactacgatttaacgatacataaagtcgacgttcatacgattatgttggtggttttaatgcatcatggggtcgacgcaatataaccaaattttgtcgttacagtttataatcactccaactacctctttgtggtcttacctaagtttctgtttgtcataatgtcgtatcaaaattactacgttataaactggatagactttaccatgttacccgtatactgttactaaaatatctactatcactatatcgtatatttatacgtgttaaccgtctttgattatcattacgtacacgaaaaaatttttcattaagcgttcgattttaacattttctaacacgttgttacacatctgtaatatttgctcgacttttttctctttactgttacagtgtcacctaattttccgctacacgtgtccacctgctactgccactgacctccctgtatcatgctaaaaattctatagttgttcatctaaaacaccgtaaaaatagacgtgattttttaaaaaatgtaccacacggattttttttaacgtatgattatatacctcgtggtttgtgtccatttagtaataaaccttactcagattacgtaaagaatgttcctcgataatataggatacatttaagattttcggtaaaaaccaacgtcggtaatatactacggttttatcgatacaatctactacgatgtagcggtacaccgtatatatctggttataaattctttacgtgatctacctttaggatataaagtaaatctacatttcgtaattcgtatcacgtatattacgggtggaaatgaataatgtagttatatttacgtccgtttctactgtccaccggtatgaatgtatcgtcccatcaccagaaatgtaaagtgttacttaagggtaaactatttttacctttgggtctcatacccgaattactatttttgacctttaggaaaaagagttcctgcaccacgtctaatttaaacgtgctccttctccagtttcttttactacctctgcgaaagggtcgcaaattcacacacagtcctgttttatgatcttgtaatgctctgactatcgtgtacaaacagactagtgtatgtcataacctttgactaagcagaacttacacgtcataaaatatttcgttctctttacccttaattttgagaattggtggttcaccaaggttgcgtccggtaaagttttcggtttcgttacgttcgttaacttgacgttaattacaatctctgtaatttatgttgactcatatcgtgtctcctgacctgtgacgttctttgttcataacttgatatatgttgtcaaggatgttctacaaatttttttctacaaatatgacaccttcgtgttaaactaccactatttgttttatgatacgtaatatgattaacctgtgtatatatatataatctcctgtcatatacatgacaacatttccctgaccatttaatatttccataaataatacacgtagtcccacatctttgtataatacaatgaaaatcccttctccgatttttcatacctttttttttatatacccttcacgtacacccaccagtccattaacaaacaggacttagacataaatcgtcgtgtcttgataggtgacgactttaacgatgtgtcgatgtgcggatgttgtggtggctctgggtatggtttcggacgaggcacccgtggtgtctttgggtcttctgtttagtgtttgctgaagctcccccatggctcgaggggatgttggggtggttcgctcacgctgagtcacggcacctgtcacaactgtctccccagatgagatgtagactgacgtgtttgtttctggccacaccatcaacatcatgttgatgtggatatcatgtaaattttccactacgtttatgtaatttcacaagttctatatctaacccatttatatttcgtaacatagttctacgaagtagatgtacctctacctgtacatgtttgctattttttgtttatcgttaacattgtaattgaatgtgttgtcttatagtttccctatttaaaaattgatgtcatttttatggattgtgtcaatgtcacagatttcctatatacagatatactatctggaatgtcgaaggtcatgacacaacgacacgaaaaacaacacgaaaacacacgaaaacacgaacacagacgaacatgcaagcgataacgatagacacagtaatatgagtcgtaattataatgaccaaaattatgacacccaatgacatcgttgtggtgatgaacgaaaacaacaaagaacgaaaacatatatggatacctactaattgcgagtacgtgttataaaccgtcatgtcattaacatatgtttgtaacacaaaccatgacacattgtacacacataccaccaaaataaaaaacaacaagtaacatataaaacaaaaaaatgacaaaaatttgtaaaaataaagacacaaaaattatttaactagtgtaccatattggtacgctgtgttttccagatgttttgcacaatttgcacgtagacgttgtgttgatatagcatgaacgtttcgacgtccttgaacaggtggtctacaatatggattccaactcccattatgacaacgactagtttaaaattttataccgtcgtaccgacacaaaaaaccccccaatccttaaccaagacctagaccgtgtccaccttctagacctatacaaggtgacccatgttgtggaggttgccgacggtgtttgtaaggatatgctgggggacattgacacctttcatatggtaatctgtgttaaccgggaaatctaagaagatatcacagtaatcatctcctttgatcaaaataactcagaccacggggacaacaatgtggttcccagggtggatgttgtccaaaatgttattggtgtagatgtctatggtgtggacgataaaatctacactgtaggtattcatgtgtactattaggatgaaagtgactaggaagacaaaatgtgggtgggtgcggacgtctttgaagtccagtaaaacatgaaagtagtagaagataatcatgtgtattaatacttctttagggatacctatgaaaataacaaaggtgtctgtcgttattatattgattatcgtgcggataaggtcccagagcgggatgctgtgcggatcctaatatatcatttccatgggtcgtccaattccaacaactgggacggaaatactgaagaggacgttttgaataatgtatactattaggacgtatacttccggaattgggactatgttggaatgttaaactcgtactcctataatcgaatcgaggcctaggactgaaatacctgtaatatcgaaatgtatccggacgtgattgtagatcctttccgtgataatctatatcatctcatccattatttgcatgatacgtatgtgcttcaccttttcgatatccccgtgcccatgtaataatagtcctaaattcatcataatgacttctatatcttaatgttgggaatgttgtacatggtaggagaaatggtgtatggtgacaaagttgtagtaatttactaccatacaaactataaatacgaggatatctatgactccttctataatataaaagtcgtagaagattgttatgaaatatatgatgtagattgtgacgtatacaaggatcgttatgatgatatggtaattcatcaccgatactataaggatattgtcgtcccggtctgtaacataaattgagattatgataatgattgagacatgatggccatgggtgtccaggatatataagataataacgtctacccccactgaaaataaatgtgggatcaataataaataattttgctgcagcatttcgatagggtataaaaaaacgtctacagagacaccgccagattgcttcggtgacagatggacggaggtcacagtcacagattccaacaatcgtgactacttatacattgtgcgtgtttgtagatgatagtacgtccgtcaagatccgataatcgacacccagtgggtatgatacgataattttttgttctaagattattttatcgtcatgggttccatagaccaaacgttatgtctcataaatctcattttaatggtctaggattattcaaacctaaaggtctgtgtagtaaaatactagggacggaggtcgcaaaccaaacccggacatgtcctcaacttcatccagcaccagtcggtaatcctcatccataatcaccagtaggaaataatttatttaacctactatgacttttagaattatttatacaaccattgagaccattgagaccatgtctattgtcccttacgtaaagatacctaatatttgtttgtgttaacacaaattatccaacatccggaggatatccacttgtaaccccttttccgtgtggaacattacgattggtccattttcgtcctcttacaggaggaaacctcaatgatttgtgacatgatgttctgcccctgtaccatctgtgtcctaaaccacgttacctaaaatgatgtaatgttcgattattttcactacaaggggatctatatacgtcaaggtaaacgtttataggactaatagatttttaccaaagactcggtatacctctatacaataaaaaaataaatgcatccctcgtttacaaacaatctgtaaataaattatcccgaccttgacatccactttgtcatggacgtctggatatataattcccatggtgaccgtgtaacggatcatgatcaataaaaggatgaggatcaccgagataccattggaggctacgtgtttataaattatttggtataaccaacgttgcacgtgttccggtattattaccataaacaacctcattggttaacaaacaatgacatcaactatgttgggcatcatgtttatacagacacacaagacgacacagaagatcactgtcatgtatatttttactgttaaaattccttataaattccgtaccacttcttatactaaatgtcaaataaaaagtcaatacattttattgtgattgtcgtctacaatactgtatataagtatcatacttgggcaggtaaaatctcctaaccttaaaaccggaatgtggtggcggaagaccatggaatctcctgtgtatagcgatacattgtagtgtccgacattgaacagtttttgggtcacgtggttttggatttctactaggtaattttttaatatgaaaaaccctccaactaaatttccttttcaaaagacgtctgaatctagtcaaaggcaacccggcatttaaaaacaatgttcgtcctgatttccggtccggattaaaatctaatccgtccgcacgtcgaggtcgtagatgtagattttttagaagatgatttgcatcttttcatttttcaattacacatttacacatacgtacatatgacacacaatacacaacatcacgaacatatatataatacacaacaccacggacaaacacaacatgtaccgcacatttacacacatattataacacgttacacaacatgcacccacaaaaacatgaatcacacatcatcaagtcatcggtatttcactacacacacaaatattaattgtgacataacaacatactgataccacgtggctatactcgaatgtattaatgtactgtcgatataacacatatatttattagatggaggtaaaacacacaatcacaggaaatgtaatggaaagttggctaaagccaacgacaaccattcgaaatatacaaaaaatgtttttgtaaggatggagtcgtcttgtgaattaggaacacaaggactatatataacaaacggttgaaatataaccgaaaacggttagaaatttgaactaagtagaacgtcataatcagtaaaaagtatgaacaccaggtgggtgtgaacattgtgaacattgtcacgaaaatccgtgtataaaaaacgtaaagatttcccgaaattaacgtgtggaaccgaaatgtataatacacacaaacggttgtggtgggatgtgtaggacggttgaaattcaattttgtacgtacattttgtaatgagtgacataatgtgtaacaatatacgtgtgtccacacaggttggctaaacctaatgtcaaaatattcgtaaagaaaaataatatcaatcattgtta

SEQ ID NO: 641 - DNA, 7851 bp, Papilloma virus
gggatattttttttgtuuutuautgguttttguuaguatgguttttguuaauggtattttugtuttuaugtgttttttugtuttuauutgtutgtaauattuuauguuatauaaagtuutgggtugauttgutggaatgtttgaugtautaaauaugttgutuuatuttutttugtaggtautttaaauaaauttaauauatatgaugtttgttuttaatgtuguutuautuuatatautgaaaugtaugatautaaauauatatuatatatututtuuggtuggtatauutuataugtautttauaaattttaaaataagtttttattuauttatatutauuatatutatatuauauatauututttguaatutttttgttaugttgtttgtuaatauagtaaataattaatuuauataatgtauagtttttggugauauaggtuaauttttugtttutgtaaatuttuttttttttgutaaggtattgtaguuauutguuauutgtuuaguuauatauaggauaauutttggttgtguatututttggutuuauattagtaugtauututttattgatgtaaugttutgatauaaaatutaaauuttgggutuugttgautggatatgauaatautugttaauauautgtugagtutuutuutuuttutatgataautguuaggtugauutgttugttttggtutgtggaggttaatattataauattguaggauaauatttauautuugutgtgatguagauauauatgtutugtgtgtgtaautgtatguatttaauuttutaaataattauuugtgtaaauuttatuauaugggguugauaagtgtututugtattagatgttauugautaggaugtuuatgtutauttuuuutuuuutguuutauattauutauuaaaaaauatuttugtuatuaatuatutguatguuutaggtuauatutuutguttttauttutautgauautgtuuuuuutuutatauuauutgaaatatttautatgtutatataatttgtatgtuugtutttgtututgtugtgttugtaataaagtaugtgtuutuutugtttgtgtgtttutuugauatgtuuaggattttgutttuataugatuatuaggtgaatugtuguautugaatauauaattattattgtattuaggtguaaattttugataaaugtaauttttatttttatgtugtugtttugutgutaataaauttgatggtutgtuguuaatauugttaagauttuauutttatgtgututatgttgtuuatutuuuugtautatgtuaauttgttauatuatauuugtuauuuutatuatattggagatuatugutautttutgtautaututgaggttgugututgtattatgtttatgattttauatuattaugtttgugtugatauaauugatttaaatttuttgataaauuataatuaaaatgtuttgaataatutggtaaattutuautatttaggtgtauatgtutaauuauauauuggugtaaauuttatuggggttuauauuguttgaaatttgtatattgtatauatatgtatatgttauaaataguauaagtauuuugatauuattaagatugtaataatgutaaatttuagutttttgututtgttgttaauttttgataautaugatttaaugatauataaagtugaugttuataugattatgttggtggttttaatguatuatggggtugauguaatataauuaaattttgtugttauagtttataatuautuuaautauututttgtggtuttauutaagtttutgtttgtuataatgtugtatuaaaattautaugttataaautggatagautttauuatgttauuugtatautgttautaaaatatutautatuautatatugtatatttataugtgttaauugtutttgattatuattaugtauaugaaaaaatttttuattaagugttugattttaauattttutaauaugttgttauauatutgtaatatttgutugauttttttututttautgttauagtgtuauutaattttuugutauaugtgtuuauutgutautguuautgauutuuutgtatuatgutaaaaattutatagttgttuatutaaaauauugtaaaaatagaugtgattttttaaaaaatgtauuauauggattttttttaaugtatgattatatauutugtggtttgtgtuuatttagtaataaauuttautuagattaugtaaagaatgttuutugataatataggatauatttaagattttuggtaaaaauuaaugtuggtaatatautauggttttatugatauaatutautaugatgtaguggtauauugtatatatutggttataaattutttaugtgatutauutttaggatataaagtaaatutauatttugtaattugtatuaugtatattaugggtggaaatgaataatgtagttatatttaugtuugtttutautgtuuauuggtatgaatgtatugtuuuatuauuagaaatgtaaagtgttauttaagggtaaautatttttauutttgggtutuatauuugaattautatttttgauutttaggaaaaagagttuutguauuaugtutaatttaaaugtgutuuttutuuagtttuttttautauututgugaaagggtuguaaattuauauauagtuutgttttatgatuttgtaatgututgautatugtgtauaaauagautagtgtatgtuataauutttgautaaguagaauttauaugtuataaaatatttugttututttauuuttaattttgagaattggtggttuauuaaggttgugtuuggtaaagttttuggtttugttaugttugttaauttgaugttaattauaatututgtaatttatgttgautuatatugtgtutuutgauutgtgaugttutttgttuataauttgatatatgttgtuaaggatgttutauaaatttttttutauaaatatgauauuttugtgttaaautauuautatttgttttatgataugtaatatgattaauutgtgtatatatatataatutuutgtuatatauatgauaauatttuuutgauuatttaatatttuuataaataatauaugtagtuuuauatutttgtataatauaatgaaaatuuuttutuugatttttuatauutttttttttatatauuuttuaugtauauuuauuagtuuattaauaaauaggauttagauataaatugtugtgtuttgataggtgaugautttaaugatgtgtugatgtguggatgttgtggtggututgggtatggtttuggaugagguauuugtggtgtutttgggtuttutgtttagtgtttgutgaagutuuuuuatggutugaggggatgttggggtggttugutuaugutgagtuaugguauutgtuauaautgtutuuuuagatgagatgtagautgaugtgtttgtttutgguuauauuatuaauatuatgttgatgtggatatuatgtaaattttuuautaugtttatgtaatttuauaagttutatatutaauuuatttatatttugtaauatagttutaugaagtagatgtauututauutgtauatgtttgutattttttgtttatugttaauattgtaattgaatgtgttgtuttatagtttuuutatttaaaaattgatgtuatttttatggattgtgtuaatgtuauagatttuutatatauagatatautatutggaatgtugaaggtuatgauauaaugauaugaaaaauaauaugaaaauauaugaaaauaugaauauagaugaauatguaagugataaugatagauauagtaatatgagtugtaattataatgauuaaaattatgauauuuaatgauatugttgtggtgatgaaugaaaauaauaaagaaugaaaauatatatggatauutautaattgugagtaugtgttataaauugtuatgtuattaauatatgtttgtaauauaaauuatgauauattgtauauauatauuauuaaaataaaaaauaauaagtaauatataaaauaaaaaaatgauaaaaatttgtaaaaataaagauauaaaaattatttaautagtgtauuatattggtaugutgtgttttuuagatgttttguauaatttguaugtagaugttgtgttgatataguatgaaugtttugaugtuuttgaauaggtggtutauaatatggattuuaautuuuattatgauaaugautagtttaaaattttatauugtugtauugauauaaaaaauuuuuuaatuuttaauuaagauutagauugtgtuuauuttutagauutatauaaggtgauuuatgttgtggaggttguugauggtgtttgtaaggatatgutgggggauattgauauutttuatatggtaatutgtgttaauugggaaatutaagaagatatuauagtaatuatutuutttgatuaaaataautuagauuauggggauaauaatgtggttuuuagggtggatgttgtuuaaaatgttattggtgtagatgtutatggtgtggaugataaaatutauautgtaggtattuatgtgtautattaggatgaaagtgautaggaagauaaaatgtgggtgggtguggaugtutttgaagtuuagtaaaauatgaaagtagtagaagataatuatgtgtattaatauttutttagggatauutatgaaaataauaaaggtgtutgtugttattatattgattatugtguggataaggtuuuagagugggatgutgtguggatuutaatatatuatttuuatgggtugtuuaattuuaauaautgggauggaaatautgaagaggaugttttgaataatgtatautattaggaugtatauttuuggaattgggautatgttggaatgttaaautugtautuutataatugaatugagguutaggautgaaatauutgtaatatugaaatgtatuuggaugtgattgtagatuutttuugtgataatutatatuatutuatuuattatttguatgataugtatgtguttuauuttttugatatuuuugtguuuatgtaataatagtuutaaattuatuataatgauttutatatuttaatgttgggaatgttgtauatggtaggagaaatggtgtatggtgauaaagttgtagtaatttautauuatauaaautataaataugaggatatutatgautuuttutataatataaaagtugtagaagattgttatgaaatatatgatgtagattgtgaugtatauaaggatugttatgatgatatggtaattuatuauugatautataaggatattgtugtuuuggtutgtaauataaattgagattatgataatgattgagauatgatgguuatgggtgtuuaggatatataagataataaugtutauuuuuautgaaaataaatgtgggatuaataataaataattttgutguaguatttugatagggtataaaaaaaugtutauagagauauuguuagattguttuggtgauagatggauggaggtuauagtuauagattuuaauaatugtgautauttatauattgtgugtgtttgtagatgatagtaugtuugtuaagatuugataatugauauuuagtgggtatgataugataattttttgttutaagattattttatugtuatgggttuuatagauuaaaugttatgtutuataaatutuattttaatggtutaggattattuaaauutaaaggtutgtgtagtaaaatautagggauggaggtuguaaauuaaauuuggauatgtuutuaauttuatuuaguauuagtuggtaatuutuatuuataatuauuagtaggaaataatttatttaauutautatgauttttagaattatttatauaauuattgagauuattgagauuatgtutattgtuuuttaugtaaagatauutaatatttgtttgtgttaauauaaattatuuaauatuuggaggatatuuauttgtaauuuuttttuugtgtggaauattaugattggtuuattttugtuututtauaggaggaaauutuaatgatttgtgauatgatgttutguuuutgtauuatutgtgtuutaaauuaugttauutaaaatgatgtaatgttugattattttuautauaaggggatutatataugtuaaggtaaaugtttataggautaatagatttttauuaaagautuggtatauututatauaataaaaaaataaatguatuuutugtttauaaauaatutgtaaataaattatuuugauuttgauatuuautttgtuatggaugtutggatatataattuuuatggtgauugtgtaauggatuatgatuaataaaaggatgaggatuauugagatauuattggaggutaugtgtttataaattatttggtataauuaaugttguaugtgttuuggtattattauuataaauaauutuattggttaauaaauaatgauatuaautatgttggguatuatgtttatauagauauauaagaugauauagaagatuautgtuatgtatatttttautgttaaaattuuttataaattuugtauuauttuttatautaaatgtuaaataaaaagtuaatauattttattgtgattgtugtutauaatautgtatataagtatuatauttggguaggtaaaatutuutaauuttaaaauuggaatgtggtgguggaagauuatggaatutuutgtgtatagugatauattgtagtgtuugauattgaauagtttttgggtuaugtggttttggatttutautaggtaattttttaatatgaaaaauuutuuaautaaatttuuttttuaaaagaugtutgaatutagtuaaagguaauuugguatttaaaaauaatgttugtuutgatttuuggtuuggattaaaatutaatuugtuuguaugtugaggtugtagatgtagattttttagaagatgatttguatuttttuatttttuaattauauatttauauataugtauatatgauauauaatauauaauatuaugaauatatatataatauauaauauuauggauaaauauaauatgtauuguauatttauauauatattataauaugttauauaauatguauuuauaaaaauatgaatuauauatuatuaagtuatuggtatttuautauauauauaaatattaattgtgauataauaauatautgatauuaugtggutatautugaatgtattaatgtautgtugatataauauatatatttattagatggaggtaaaauauauaatuauaggaaatgtaatggaaagttggutaaaguuaaugauaauuattugaaatatauaaaaaatgtttttgtaaggatggagtugtuttgtgaattaggaauauaaggautatatataauaaauggttgaaatataauugaaaauggttagaaatttgaautaagtagaaugtuataatuagtaaaaagtatgaauauuaggtgggtgtgaauattgtgaauattgtuaugaaaatuugtgtataaaaaaugtaaagatttuuugaaattaaugtgtggaauugaaatgtataatauauauaaauggttgtggtgggatgtgtaggauggttgaaattuaattttgtaugtauattttgtaatgagtgauataatgtgtaauaatataugtgtgtuuauauaggttggutaaauutaatgtuaaaatattugtaaagaaaaataatatuaatuattgtta

SEQ ID NO: 642 - DNA, 7851 bp, Papilloma virus
gggatattttttttgttttttattggtttttgttagtatggtttttgttaatggtatttttgtttttatgtgtttttttgtttttatttgtttgtaatattttatgttatataaagttttgggttgatttgttggaatgtttgatgtattaaatatgttgttttatttttttttgtaggtattttaaataaatttaatatatatgatgtttgtttttaatgttgttttattttatatattgaaatgtatgatattaaatatatattatatattttttttggttggtatattttatatgtattttataaattttaaaataagtttttatttatttatatttattatatttatattatatatatttttttgtaatttttttgttatgttgtttgttaatatagtaaataattaatttatataatgtatagtttttggtgatataggttaattttttgtttttgtaaatttttttttttttgttaaggtattgtagttatttgttatttgtttagttatatataggataatttttggttgtgtatttttttggttttatattagtatgtatttttttattgatgtaatgttttgatataaaatttaaattttgggttttgttgattggatatgataatatttgttaatatattgttgagtttttttttttttttatgataattgttaggttgatttgtttgttttggtttgtggaggttaatattataatattgtaggataatatttatattttgttgtgatgtagatatatatgttttgtgtgtgtaattgtatgtatttaattttttaaataattatttgtgtaaattttattatatggggttgataagtgttttttgtattagatgttattgattaggatgtttatgtttatttttttttttttgttttatattatttattaaaaaatatttttgttattaattatttgtatgttttaggttatattttttgtttttatttttattgatattgtttttttttttatattatttgaaatatttattatgtttatataatttgtatgtttgtttttgtttttgttgtgtttgtaataaagtatgtgttttttttgtttgtgtgtttttttgatatgtttaggattttgtttttatatgattattaggtgaattgttgtatttgaatatataattattattgtatttaggtgtaaatttttgataaatgtaatttttatttttatgttgttgttttgttgttaataaatttgatggtttgttgttaatattgttaagattttatttttatgtgttttatgttgtttatttttttgtattatgttaatttgttatattatatttgttatttttattatattggagattattgttattttttgtattattttgaggttgtgttttgtattatgtttatgattttatattattatgtttgtgttgatataattgatttaaattttttgataaattataattaaaatgttttgaataatttggtaaatttttattatttaggtgtatatgtttaattatatattggtgtaaattttattggggtttatattgtttgaaatttgtatattgtatatatatgtatatgttataaatagtataagtattttgatattattaagattgtaataatgttaaattttagttttttgtttttgttgttaatttttgataattatgatttaatgatatataaagttgatgtttatatgattatgttggtggttttaatgtattatggggttgatgtaatataattaaattttgttgttatagtttataattattttaattatttttttgtggttttatttaagtttttgtttgttataatgttgtattaaaattattatgttataaattggatagattttattatgttatttgtatattgttattaaaatatttattattattatattgtatatttatatgtgttaattgtttttgattattattatgtatatgaaaaaattttttattaagtgtttgattttaatattttttaatatgttgttatatatttgtaatatttgtttgatttttttttttttattgttatagtgttatttaattttttgttatatgtgtttatttgttattgttattgatttttttgtattatgttaaaaattttatagttgtttatttaaaatattgtaaaaatagatgtgattttttaaaaaatgtattatatggattttttttaatgtatgattatatattttgtggtttgtgtttatttagtaataaattttatttagattatgtaaagaatgttttttgataatataggatatatttaagatttttggtaaaaattaatgttggtaatatattatggttttattgatataatttattatgatgtagtggtatattgtatatatttggttataaattttttatgtgatttatttttaggatataaagtaaatttatattttgtaatttgtattatgtatattatgggtggaaatgaataatgtagttatatttatgtttgtttttattgtttattggtatgaatgtattgttttattattagaaatgtaaagtgttatttaagggtaaattatttttatttttgggttttatatttgaattattatttttgatttttaggaaaaagagtttttgtattatgtttaatttaaatgtgttttttttttagttttttttattatttttgtgaaagggttgtaaatttatatatagttttgttttatgattttgtaatgttttgattattgtgtataaatagattagtgtatgttataatttttgattaagtagaatttatatgttataaaatattttgttttttttatttttaattttgagaattggtggtttattaaggttgtgtttggtaaagtttttggttttgttatgtttgttaatttgatgttaattataatttttgtaatttatgttgatttatattgtgttttttgatttgtgatgttttttgtttataatttgatatatgttgttaaggatgttttataaatttttttttataaatatgatatttttgtgttaaattattattatttgttttatgatatgtaatatgattaatttgtgtatatatatataattttttgttatatatatgataatatttttttgattatttaatatttttataaataatatatgtagttttatatttttgtataatataatgaaaattttttttttgattttttatatttttttttttatatattttttatgtatatttattagtttattaataaataggatttagatataaattgttgtgttttgataggtgatgattttaatgatgtgttgatgtgtggatgttgtggtggttttgggtatggttttggatgaggtatttgtggtgtttttgggttttttgtttagtgtttgttgaagtttttttatggtttgaggggatgttggggtggtttgtttatgttgagttatggtatttgttataattgtttttttagatgagatgtagattgatgtgtttgtttttggttatattattaatattatgttgatgtggatattatgtaaattttttattatgtttatgtaattttataagttttatatttaatttatttatattttgtaatatagttttatgaagtagatgtatttttatttgtatatgtttgttattttttgtttattgttaatattgtaattgaatgtgttgttttatagtttttttatttaaaaattgatgttatttttatggattgtgttaatgttatagattttttatatatagatatattatttggaatgttgaaggttatgatataatgatatgaaaaataatatgaaaatatatgaaaatatgaatatagatgaatatgtaagtgataatgatagatatagtaatatgagttgtaattataatgattaaaattatgatatttaatgatattgttgtggtgatgaatgaaaataataaagaatgaaaatatatatggatatttattaattgtgagtatgtgttataaattgttatgttattaatatatgtttgtaatataaattatgatatattgtatatatatattattaaaataaaaaataataagtaatatataaaataaaaaaatgataaaaatttgtaaaaataaagatataaaaattatttaattagtgtattatattggtatgttgtgttttttagatgttttgtataatttgtatgtagatgttgtgttgatatagtatgaatgttttgatgtttttgaataggtggtttataatatggattttaatttttattatgataatgattagtttaaaattttatattgttgtattgatataaaaaattttttaatttttaattaagatttagattgtgtttattttttagatttatataaggtgatttatgttgtggaggttgttgatggtgtttgtaaggatatgttgggggatattgatattttttatatggtaatttgtgttaattgggaaatttaagaagatattatagtaattattttttttgattaaaataatttagattatggggataataatgtggtttttagggtggatgttgtttaaaatgttattggtgtagatgtttatggtgtggatgataaaatttatattgtaggtatttatgtgtattattaggatgaaagtgattaggaagataaaatgtgggtgggtgtggatgtttttgaagtttagtaaaatatgaaagtagtagaagataattatgtgtattaatatttttttagggatatttatgaaaataataaaggtgtttgttgttattatattgattattgtgtggataaggttttagagtgggatgttgtgtggattttaatatattatttttatgggttgtttaattttaataattgggatggaaatattgaagaggatgttttgaataatgtatattattaggatgtatatttttggaattgggattatgttggaatgttaaatttgtatttttataattgaattgaggtttaggattgaaatatttgtaatattgaaatgtatttggatgtgattgtagattttttttgtgataatttatattattttatttattatttgtatgatatgtatgtgttttatttttttgatatttttgtgtttatgtaataatagttttaaatttattataatgatttttatattttaatgttgggaatgttgtatatggtaggagaaatggtgtatggtgataaagttgtagtaatttattattatataaattataaatatgaggatatttatgattttttttataatataaaagttgtagaagattgttatgaaatatatgatgtagattgtgatgtatataaggattgttatgatgatatggtaatttattattgatattataaggatattgttgttttggtttgtaatataaattgagattatgataatgattgagatatgatggttatgggtgtttaggatatataagataataatgtttatttttattgaaaataaatgtgggattaataataaataattttgttgtagtattttgatagggtataaaaaaatgtttatagagatattgttagattgttttggtgatagatggatggaggttatagttatagattttaataattgtgattatttatatattgtgtgtgtttgtagatgatagtatgtttgttaagatttgataattgatatttagtgggtatgatatgataattttttgttttaagattattttattgttatgggttttatagattaaatgttatgttttataaattttattttaatggtttaggattatttaaatttaaaggtttgtgtagtaaaatattagggatggaggttgtaaattaaatttggatatgtttttaattttatttagtattagttggtaatttttatttataattattagtaggaaataatttatttaatttattatgatttttagaattatttatataattattgagattattgagattatgtttattgttttttatgtaaagatatttaatatttgtttgtgttaatataaattatttaatatttggaggatatttatttgtaattttttttttgtgtggaatattatgattggtttatttttgtttttttataggaggaaattttaatgatttgtgatatgatgttttgtttttgtattatttgtgttttaaattatgttatttaaaatgatgtaatgtttgattatttttattataaggggatttatatatgttaaggtaaatgtttataggattaatagatttttattaaagatttggtatatttttatataataaaaaaataaatgtattttttgtttataaataatttgtaaataaattattttgattttgatatttattttgttatggatgtttggatatataatttttatggtgattgtgtaatggattatgattaataaaaggatgaggattattgagatattattggaggttatgtgtttataaattatttggtataattaatgttgtatgtgttttggtattattattataaataattttattggttaataaataatgatattaattatgttgggtattatgtttatatagatatataagatgatatagaagattattgttatgtatatttttattgttaaaattttttataaattttgtattattttttatattaaatgttaaataaaaagttaatatattttattgtgattgttgtttataatattgtatataagtattatatttgggtaggtaaaattttttaattttaaaattggaatgtggtggtggaagattatggaattttttgtgtatagtgatatattgtagtgtttgatattgaatagtttttgggttatgtggttttggatttttattaggtaattttttaatatgaaaaattttttaattaaattttttttttaaaagatgtttgaatttagttaaaggtaatttggtatttaaaaataatgtttgttttgatttttggtttggattaaaatttaatttgtttgtatgttgaggttgtagatgtagattttttagaagatgatttgtatttttttattttttaattatatatttatatatatgtatatatgatatataatatataatattatgaatatatatataatatataatattatggataaatataatatgtattgtatatttatatatatattataatatgttatataatatgtatttataaaaatatgaattatatattattaagttattggtattttattatatatataaatattaattgtgatataataatatattgatattatgtggttatatttgaatgtattaatgtattgttgatataatatatatatttattagatggaggtaaaatatataattataggaaatgtaatggaaagttggttaaagttaatgataattatttgaaatatataaaaaatgtttttgtaaggatggagttgttttgtgaattaggaatataaggattatatataataaatggttgaaatataattgaaaatggttagaaatttgaattaagtagaatgttataattagtaaaaagtatgaatattaggtgggtgtgaatattgtgaatattgttatgaaaatttgtgtataaaaaatgtaaagattttttgaaattaatgtgtggaattgaaatgtataatatatataaatggttgtggtgggatgtgtaggatggttgaaatttaattttgtatgtatattttgtaatgagtgatataatgtgtaataatatatgtgtgtttatataggttggttaaatttaatgttaaaatatttgtaaagaaaaataatattaattattgtta

SEQ ID NO: 643 - DNA, 7833 bp, Papilloma virus
cttataacattttataagtatcttgtttaaaaaaagggagtaaccgaaaacggtcaggaccgaaatcggtggatataaaacgcagtcacagtttctgtccataccgatggcgcgatttcacaatcctgcagaacggccatacaaattgccagacctgtgcacaacgctggacaccaccttgcaggacattacaatagcctgtgtctattgcagacgaccactacagcaaaccgaggtatatgaatttgcatttagtgatttatatgtagtatatagggacggggaaccactagctgcatgccaatcatgtataaaattttatgctaaaatacgggagctacgatattactcggactcggtgtatgcaactacattagaaaatataactaatacaaagttatataatttattaataaggtgcatgtgttgtctgaaaccgctgtgtccagcagaaaaattaagacacctaaatagcaaacgaagatttcataaaatagcaggaagctatacaggacagtgtcgacggtgctggaccacaaaacgggaggaccgcagactaacacgaagagaaacccaagtataacatcagatatgcgtggaccaaagcccaccttgcaggaaattgtattagatttatgtccttacaatgaaatacagccggttgaccttgtatgtcacgagcaattaggagagtcagaggatgaaatagatgaacccgaccatgcagttaatcaccaacatcaactactagccagacgggatgaaccacagcgtcacacaatacagtgttcgtgttgtaagtgtaacaacacactgcagctggtagtagaagcctcacgggatactctgcgacaactacagcagctgtttatggactcactaggatttgtgtgtccgtggtgtgcaactgcaaaccagtaacctgctatggccaatcgtgaaggtacagacggggatgggtcgggatgtaacggatggtttctagtacaggcaatagtagataaacaaacaggcgacacagtgtcggaggatgaggatgaaaatgcaacagatacaggttcagacctggcagactttattgatgattccacagatatttgtgtacaggcagagcgtgagacagcacaggtacttttacatatgcaagaggcccaaagggatgcacaagcagtgcgtgccttaaaacgaaagtatacagacagcagtggcgacactagaccgtatggaaaaaaagtaggcaggaataccaggggaacactacaggaaatttcattaaatgtaagcagtacgcaggcaacacaaacggtgtattccgtgccagacagcggatatggcaatatggaagtggaaacagctgaagtggaggaggtaactgtagcaactaatacaaatggggatgctgaaggggaacatggcggcagtgtacgggaggagtgcagtagtgtggatagtgctatagatagtgaaaaccaggatcccaaatctccaactgcacaaattaaattattgttacaatccaataacaaaaaggctgcaatgctaacacaatttaaagaaacatatggactatcctttactgacctggtacgtacgtttaaaagtgataaaacaacatgtacagactgggtggcagccatatttggagtacatccaactattgcagaaggatttaaaacattaatcaacaaatatgccttatatacacatatacaaagcttagacacaaaacaaggagtactaattttaatgctaataagatatacatgtggaaaaaatagggttactgtaggaaagggattaagtacattgttacatgttccagaaagttgtatgcttctggagcctcctaaactgcgcagccctgtagcagcactatattggtatcgcacaggtatatccaatattagtgtggtaacaggggatacgccagaatggatacaacgattaactgttatacaacatggaatagatgatagtgtatttgacctatcggacatggtacaatgggcatttgacaatgaatatactgatgaaagtgacatagcatttaattatgcaatgttagcagattgtaacagtaatgctgcagcctttttaaaaagtaactgccaggcaaaatatgtaaaagattgtgcaacaatgtgtaaacattacaagcgagcacaaaaaaggcaaatgtccatgtctcaatggataaaatttaggtgtagtaaatgtgatgaaggcggggactggagacccatagtacaattcttaagatatcaaggaatagaatttatatcctttttatgtgcattaaaggaatttttaaagggtactcccaaaaaaaactgtatagttatatatggacctgcgaatacaggaaagtcacatttttgtatgagccttatgcattttttacagggcacagttatttcatatgtaaactccaccagccacttttggctagaaccacttgcagatgcaaaactagcaatgttagatgatgcaaccggtacctgctggtcatatttcgataattatatgagaaatgcattagatgggtatgcaataagtttagataggaaatataaaagtttactacaaatgaaatgtccaccattattaataacctccaataccaatcctgtggaagacgataggtggccatatttacgtagtaggctaacagtgtttaaatttcctaatgcatttccatttgaccaaaacaggaatccagtgtacacaatcaatgataaaaactggaaatgtttttttgaaaagacttggtgcagattagacttgcagcaggacgaggatgaaggagacaatgatgaaaacactttcacaacgtttaaatgtgttacaggacaaaatactagaatactatgaacaagacagtaaatcaatatatgatcaaattaattattggaaatgtgtgcgaatggaaaatgcaatattttatgcagcacgagaacgtggcatgcatactattgaccaccaggtggtgccaaccataaacatttcaaaatgtaaagcatatcaagctattgaactgcagatggcactagaaagtgttgcacaaactgaatacaatacagaggagtggacattaaaagacactagtaatgaactgtggcatacacagccaaaacaatgttttaaaaaacaaggaactacagtggaggtgtggtatgatggggacaaatgtaatgctatgaactatgtattatggggtgctatatattataaaaataatatagacatatggtgtaaaacagaagggtgtgtggactattggggtatatattatatgaacgagcacctaaaagtatactatgaagtgtttattcaagatgcggaaaggtatgggactagtggcaaatgggaagtgcattataatggcaacataattcattgtcctgactctatgtgcagtaccagtgacggatcggtacccactactgaacttactaccgaattatcaaacaccaccgcgacccattccaccgcaacaaccccatgcacccaaaaaacaatcccgccgccgtctcgaaagcgacctcgacagtgtgcagtcacagagcccactgagcccgacggagtgtccctggaccatcttaacaacccactccacagtaacagtacaggccacaacacaagacggtacctcagttgtggtaacactacgcctataatacatttaaaaggtgacaaaaatggtttaaaatgtttaagatatagactacaaaaatatgacacattgtttgaaaatatttcatgtacctggcattggatacggggtaagggaaccaaaaacgctggcatattaactgttacatatgccacagagtcacaacgccaaaaatttttggacactgttaaaataccttctagtgtacatgtttcattgggttacatgacattgtaaagtatactatggatattgtgtatgtatattgtatacatactacatagatgatattattggtatttttggtgtggtttggtgtgtgtatatatatatgttgcaatgtcccgcttttgccgtctgtgcatgtgtgtgcgtatgtgtggataattgtgtttgtgtttattcttatacgtaccacaccattggaggtgttttttgtatatttactattttttgtattgcccatgtggttgttgcatagactggcaatggatatgatatagtactgtatatgtatgtgcattgtgcataactactgtacatagctttttatatttttttttgttactaataaacatggtttcccaccgtgctgccaggcgtaagcgtgcatctgcaactgacctatatagaacctgtaaacaatcgggtacctgtccaccagacgttgttgataaagttgagggtactacacttgctgacaaaattttacagtggactagtttaggtatatttttgggtgggttaggcataggcacaggtactggtactgggggacgcacaggatatatacccctggggggtaggcctaatactgttgtagatgtgtctcctgcacgtccacctgtagttattgaacctgttggtccttctgagccatctattgtgcaattggtggaggactcaagtgttataacctctggaacaccagtaccaacatttacaggcacctctggatttgaaattacttcttcttctactactacgcctgcggtattggatattacaccctcctctgggtctgtacaaataacctctactagttatactaaccctgcctttacggatccttccttaattgaggttccccaaacaggtgaaacctcgggtaatatatttgtcagtacccctacatcaggtacacatggctatgaggaaatacctatggaagtgtttgccacacatggcacaggtaccgaacctattagcagcacacctacacctggaatcagtcgtgtggcaggaccacgtttatatagtagagcacatcagcaggttcgtgttagtaattttgattttgtaactcacccttcatcatttgtaacatttgataatcctgcttttgagcctgttgatactacattaacatatgaagctgctgacatagctccagatccggattttctggacattgttcgtttacataggcctgccttaacctcgcgtaaaggaacagtaaggtttagtaggcttggcaaaaaggctaccatggttacccggcgtggcacacaaattggagcgcaagtacattattaccatgacattagtagtattgctcctgctgaaagcattgaattacagcccctagttcacgctgagccctctgatgcttcagatgcattatttgatatatatgctgatgtggacaataacacatatttagatactgcatttaataatacaagggattcgggcactacatataacacaggctcactaccttctgtggcttcttcagcatctactaaatatgccaatacaactattccttttagtacctcatggaatatgcctgtaaatactggtcctgatattgctttaccaagtactactccacagttgccattggtgccttctggaccaatagacacaacatatgcaataaccattcagggttccaattattatttgttgccattattgtattttttcctaaaaaaacgtaaacgtattccctattttttttcagatggctatgtggcggtctagtgacagcatggtgtatttgcctccaccttctgtggcgaaggttgtcaatactgatgattatgttacacgcacaggcatatattattatgctggcagctctagattattaacagtaggacatccatattttaaagtgggtatgaatggtggtcgcaagcaggacattccaaaggtgtctgcatatcaatatagggtatttcgcgtgacattgcccgatcctaataaattcagtattccagatgcatccttatataatccagaaacacaacgtttagtatgggcttgtgtaggggtggaggtgggcaggggccagccattgggtgttggtattagtggacacccattatataatagacaggatgatactgaaaactcaccattttcatcaaccaccaataaggacagtagggataatgtgtctgtggattataaacagacacagttgtgcattataggctgtgttcccgccattggggagcactggggtaagggaaaggcatgcaagcccaataatgtatctacgggggactgtcctcctttggaactagtaaacacccctattgaggatggtgatatgattgatactggctatggagctatggactttggtgcattgcaggaaaccaaaagtgaggtgcctttagatatttgtcaatccatttgtaaatatcctgattatttgcaaatgtctgcagatgtgtatggggacagtatgttcttctgtttacgtagggaacaactgtttgcaagacatttttggaatcgtggtggtatggtgggtgacgccattcctgcccaattgtatattaagggcacagatatacgtgcaaaccccggtagttctgtatactgcccctctcccagcggttccatggtaacctctgattcccagttatttaataagccttattggctacataaggcccagggccacaacaatggtatatgttggcataatcaattatttcttactgttgtggacactacccgtagtaccaactttacattatctacctctatagagtcttccataccttctacatatgatccttctaagtttaaggaatataccaggcacgtggaggagtatgatttacaatttatatttcaactgtgtactgtcacattaacaactgatgttatgtcttatattcacactatgaattcctctatattggacaattggaattttgctgtagctcctccaccatctgccagtttggtagacacttacagatacctacagtctgcagccattacatgtcaaaaggatgctccagcacctgaaaagaaagatccatatgacggtctaaagttttggaatgttgacttaagggaaaagtttagtttggaacttgatcaattccctttgggacgtaaatttttgttgcaggccagggtccgcaggcgccctactataggtccccgaaagcggcctgctgcatccacttcctcgtcctcagctactaaacacaaacgtaaacgtgtgtctaaataatgcatgtgtatgccttgttatgtgtgtgtatgttgtttgtttccttatgtgttgagtgtatatgtgtatgtttgtaggtatgtgtgtatatgtttttgttaataaagtatgtatgacagtttcatgtgtgattgcacaccctgtgactaacagtgtatttgttttacatataataggtctgcaacatttcatacataatctatatgccctaccctaaggtgtgtttactacctaatatgtaatttttacattgttgtatgcgtttctacattttatacttcgccattttgtggcgaccgaagtcggtcgtgggttgagcattttttttaaactagtggaaaccacctttctcagcaaaaacatgtctttaccttaggttcaccctgcatagttggcactggtaacagttttactggcgcgccttattactcatcatcctgtccaggtgcactgcaacaatactttggcaacatccatatctccaccctatgtaataaaactgcttttaggcatatattttagctgtttttacttgcttaattaaatagttggcctgtataactactttttgattcaggaatgtgtcttacagtataagttatacaagtgactaatgtagcacacaatagtttatgcaaccgaaataggttgggcatacatacctatactttta

SEQ ID NO: 644 - DNA, 7833 bp, Papilloma virus
uttataauattttataagtatuttgtttaaaaaaagggagtaauugaaaauggtuaggauugaaatuggtggatataaaauguagtuauagtttutgtuuatauugatggugugatttuauaatuutguagaaugguuatauaaattguuagauutgtguauaaugutggauauuauuttguaggauattauaataguutgtgtutattguagaugauuautauaguaaauugaggtatatgaatttguatttagtgatttatatgtagtatatagggauggggaauuautagutguatguuaatuatgtataaaattttatgutaaaataugggagutaugatattautuggautuggtgtatguaautauattagaaaatataautaatauaaagttatataatttattaataaggtguatgtgttgtutgaaauugutgtgtuuaguagaaaaattaagauauutaaataguaaaugaagatttuataaaataguaggaagutatauaggauagtgtugauggtgutggauuauaaaaugggaggauuguagautaauaugaagagaaauuuaagtataauatuagatatgugtggauuaaaguuuauuttguaggaaattgtattagatttatgtuuttauaatgaaatauaguuggttgauuttgtatgtuaugaguaattaggagagtuagaggatgaaatagatgaauuugauuatguagttaatuauuaauatuaautautaguuagaugggatgaauuauagugtuauauaatauagtgttugtgttgtaagtgtaauaauauautguagutggtagtagaaguutuaugggataututgugauaautauaguagutgtttatggautuautaggatttgtgtgtuugtggtgtguaautguaaauuagtaauutgutatgguuaatugtgaaggtauagauggggatgggtugggatgtaauggatggtttutagtauagguaatagtagataaauaaauaggugauauagtgtuggaggatgaggatgaaaatguaauagatauaggttuagauutgguagautttattgatgattuuauagatatttgtgtauagguagagugtgagauaguauaggtauttttauatatguaagagguuuaaagggatguauaaguagtgugtguuttaaaaugaaagtatauagauaguagtggugauautagauugtatggaaaaaaagtagguaggaatauuaggggaauautauaggaaatttuattaaatgtaaguagtauguagguaauauaaauggtgtattuugtguuagauaguggatatgguaatatggaagtggaaauagutgaagtggaggaggtaautgtaguaautaatauaaatggggatgutgaaggggaauatggugguagtgtaugggaggagtguagtagtgtggatagtgutatagatagtgaaaauuaggatuuuaaatutuuaautguauaaattaaattattgttauaatuuaataauaaaaaggutguaatgutaauauaatttaaagaaauatatggautatuutttautgauutggtaugtaugtttaaaagtgataaaauaauatgtauagautgggtgguaguuatatttggagtauatuuaautattguagaaggatttaaaauattaatuaauaaatatguuttatatauauatatauaaaguttagauauaaaauaaggagtautaattttaatgutaataagatatauatgtggaaaaaatagggttautgtaggaaagggattaagtauattgttauatgttuuagaaagttgtatguttutggaguutuutaaautguguaguuutgtaguaguautatattggtatuguauaggtatatuuaatattagtgtggtaauaggggatauguuagaatggatauaaugattaautgttatauaauatggaatagatgatagtgtatttgauutatuggauatggtauaatggguatttgauaatgaatatautgatgaaagtgauataguatttaattatguaatgttaguagattgtaauagtaatgutguaguutttttaaaaagtaautguuagguaaaatatgtaaaagattgtguaauaatgtgtaaauattauaagugaguauaaaaaagguaaatgtuuatgtutuaatggataaaatttaggtgtagtaaatgtgatgaagguggggautggagauuuatagtauaattuttaagatatuaaggaatagaatttatatuutttttatgtguattaaaggaatttttaaagggtautuuuaaaaaaaautgtatagttatatatggauutgugaatauaggaaagtuauatttttgtatgaguuttatguattttttauaggguauagttatttuatatgtaaautuuauuaguuauttttggutagaauuauttguagatguaaaautaguaatgttagatgatguaauuggtauutgutggtuatatttugataattatatgagaaatguattagatgggtatguaataagtttagataggaaatataaaagtttautauaaatgaaatgtuuauuattattaataauutuuaatauuaatuutgtggaagaugataggtgguuatatttaugtagtaggutaauagtgtttaaatttuutaatguatttuuatttgauuaaaauaggaatuuagtgtauauaatuaatgataaaaautggaaatgtttttttgaaaagauttggtguagattagauttguaguaggaugaggatgaaggagauaatgatgaaaauautttuauaaugtttaaatgtgttauaggauaaaatautagaatautatgaauaagauagtaaatuaatatatgatuaaattaattattggaaatgtgtgugaatggaaaatguaatattttatguaguaugagaaugtgguatguatautattgauuauuaggtggtguuaauuataaauatttuaaaatgtaaaguatatuaagutattgaautguagatgguautagaaagtgttguauaaautgaatauaatauagaggagtggauattaaaagauautagtaatgaautgtgguatauauaguuaaaauaatgttttaaaaaauaaggaautauagtggaggtgtggtatgatggggauaaatgtaatgutatgaautatgtattatggggtgutatatattataaaaataatatagauatatggtgtaaaauagaagggtgtgtggautattggggtatatattatatgaaugaguauutaaaagtatautatgaagtgtttattuaagatguggaaaggtatgggautagtgguaaatgggaagtguattataatgguaauataattuattgtuutgaututatgtguagtauuagtgauggatuggtauuuautautgaauttautauugaattatuaaauauuauugugauuuattuuauuguaauaauuuuatguauuuaaaaaauaatuuuguuguugtutugaaagugauutugauagtgtguagtuauagaguuuautgaguuugauggagtgtuuutggauuatuttaauaauuuautuuauagtaauagtauagguuauaauauaagauggtauutuagttgtggtaauautauguutataatauatttaaaaggtgauaaaaatggtttaaaatgtttaagatatagautauaaaaatatgauauattgtttgaaaatatttuatgtauutgguattggatauggggtaagggaauuaaaaaugutgguatattaautgttauatatguuauagagtuauaauguuaaaaatttttggauautgttaaaatauuttutagtgtauatgtttuattgggttauatgauattgtaaagtatautatggatattgtgtatgtatattgtatauatautauatagatgatattattggtatttttggtgtggtttggtgtgtgtatatatatatgttguaatgtuuuguttttguugtutgtguatgtgtgtgugtatgtgtggataattgtgtttgtgtttattuttataugtauuauauuattggaggtgttttttgtatatttautattttttgtattguuuatgtggttgttguatagautgguaatggatatgatatagtautgtatatgtatgtguattgtguataautautgtauatagutttttatatttttttttgttautaataaauatggtttuuuauugtgutguuaggugtaagugtguatutguaautgauutatatagaauutgtaaauaatugggtauutgtuuauuagaugttgttgataaagttgagggtautauauttgutgauaaaattttauagtggautagtttaggtatatttttgggtgggttagguatagguauaggtautggtautgggggauguauaggatatatauuuutggggggtagguutaatautgttgtagatgtgtutuutguaugtuuauutgtagttattgaauutgttggtuuttutgaguuatutattgtguaattggtggaggautuaagtgttataauututggaauauuagtauuaauatttauagguauututggatttgaaattauttuttuttutautautauguutguggtattggatattauauuutuututgggtutgtauaaataauututautagttatautaauuutguutttauggatuuttuuttaattgaggttuuuuaaauaggtgaaauutugggtaatatatttgtuagtauuuutauatuaggtauauatggutatgaggaaatauutatggaagtgtttguuauauatgguauaggtauugaauutattaguaguauauutauauutggaatuagtugtgtgguaggauuaugtttatatagtagaguauatuaguaggttugtgttagtaattttgattttgtaautuauuuttuatuatttgtaauatttgataatuutguttttgaguutgttgatautauattaauatatgaagutgutgauatagutuuagatuuggattttutggauattgttugtttauatagguutguuttaauutugugtaaaggaauagtaaggtttagtagguttgguaaaaaggutauuatggttauuuggugtgguauauaaattggaguguaagtauattattauuatgauattagtagtattgutuutgutgaaaguattgaattauaguuuutagttuaugutgaguuututgatguttuagatguattatttgatatatatgutgatgtggauaataauauatatttagatautguatttaataatauaagggattuggguautauatataauauaggutuautauuttutgtgguttuttuaguatutautaaatatguuaatauaautattuuttttagtauutuatggaatatguutgtaaatautggtuutgatattgutttauuaagtautautuuauagttguuattggtguuttutggauuaatagauauaauatatguaataauuattuagggttuuaattattatttgttguuattattgtattttttuutaaaaaaaugtaaaugtattuuutattttttttuagatggutatgtgguggtutagtgauaguatggtgtatttguutuuauuttutgtggugaaggttgtuaatautgatgattatgttauauguauagguatatattattatgutgguagututagattattaauagtaggauatuuatattttaaagtgggtatgaatggtggtuguaaguaggauattuuaaaggtgtutguatatuaatatagggtatttugugtgauattguuugatuutaataaattuagtattuuagatguatuuttatataatuuagaaauauaaugtttagtatggguttgtgtaggggtggaggtggguagggguuaguuattgggtgttggtattagtggauauuuattatataatagauaggatgatautgaaaautuauuattttuatuaauuauuaataaggauagtagggataatgtgtutgtggattataaauagauauagttgtguattataggutgtgttuuuguuattggggaguautggggtaagggaaagguatguaaguuuaataatgtatutaugggggautgtuutuutttggaautagtaaauauuuutattgaggatggtgatatgattgatautggutatggagutatggautttggtguattguaggaaauuaaaagtgaggtguutttagatatttgtuaatuuatttgtaaatatuutgattatttguaaatgtutguagatgtgtatggggauagtatgttuttutgtttaugtagggaauaautgtttguaagauatttttggaatugtggtggtatggtgggtgauguuattuutguuuaattgtatattaaggguauagatataugtguaaauuuuggtagttutgtatautguuuututuuuaguggttuuatggtaauututgattuuuagttatttaataaguuttattggutauataagguuuaggguuauaauaatggtatatgttgguataatuaattatttuttautgttgtggauautauuugtagtauuaautttauattatutauututatagagtuttuuatauuttutauatatgatuuttutaagtttaaggaatatauuagguaugtggaggagtatgatttauaatttatatttuaautgtgtautgtuauattaauaautgatgttatgtuttatattuauautatgaattuututatattggauaattggaattttgutgtagutuutuuauuatutguuagtttggtagauauttauagatauutauagtutguaguuattauatgtuaaaaggatgutuuaguauutgaaaagaaagatuuatatgauggtutaaagttttggaatgttgauttaagggaaaagtttagtttggaauttgatuaattuuutttgggaugtaaatttttgttguagguuagggtuuguagguguuutautataggtuuuugaaagugguutgutguatuuauttuutugtuutuagutautaaauauaaaugtaaaugtgtgtutaaataatguatgtgtatguuttgttatgtgtgtgtatgttgtttgtttuuttatgtgttgagtgtatatgtgtatgtttgtaggtatgtgtgtatatgtttttgttaataaagtatgtatgauagtttuatgtgtgattguauauuutgtgautaauagtgtatttgttttauatataataggtutguaauatttuatauataatutatatguuutauuutaaggtgtgtttautauutaatatgtaatttttauattgttgtatgugtttutauattttatauttuguuattttgtggugauugaagtuggtugtgggttgaguattttttttaaautagtggaaauuauutttutuaguaaaaauatgtutttauuttaggttuauuutguatagttgguautggtaauagttttautgguguguuttattautuatuatuutgtuuaggtguautguaauaatautttgguaauatuuatatutuuauuutatgtaataaaautguttttagguatatattttagutgtttttauttguttaattaaatagttgguutgtataautautttttgattuaggaatgtgtuttauagtataagttatauaagtgautaatgtaguauauaatagtttatguaauugaaataggttggguatauatauutatautttta

SEQ ID NO: 645 - DNA, 7833 bp, Papilloma virus
tttataatattttataagtattttgtttaaaaaaagggagtaattgaaaatggttaggattgaaattggtggatataaaatgtagttatagtttttgtttatattgatggtgtgattttataattttgtagaatggttatataaattgttagatttgtgtataatgttggatattattttgtaggatattataatagtttgtgtttattgtagatgattattatagtaaattgaggtatatgaatttgtatttagtgatttatatgtagtatatagggatggggaattattagttgtatgttaattatgtataaaattttatgttaaaatatgggagttatgatattatttggatttggtgtatgtaattatattagaaaatataattaatataaagttatataatttattaataaggtgtatgtgttgtttgaaattgttgtgtttagtagaaaaattaagatatttaaatagtaaatgaagattttataaaatagtaggaagttatataggatagtgttgatggtgttggattataaaatgggaggattgtagattaatatgaagagaaatttaagtataatattagatatgtgtggattaaagtttattttgtaggaaattgtattagatttatgtttttataatgaaatatagttggttgattttgtatgttatgagtaattaggagagttagaggatgaaatagatgaatttgattatgtagttaattattaatattaattattagttagatgggatgaattatagtgttatataatatagtgtttgtgttgtaagtgtaataatatattgtagttggtagtagaagttttatgggatattttgtgataattatagtagttgtttatggatttattaggatttgtgtgtttgtggtgtgtaattgtaaattagtaatttgttatggttaattgtgaaggtatagatggggatgggttgggatgtaatggatggtttttagtataggtaatagtagataaataaataggtgatatagtgttggaggatgaggatgaaaatgtaatagatataggtttagatttggtagattttattgatgattttatagatatttgtgtataggtagagtgtgagatagtataggtatttttatatatgtaagaggtttaaagggatgtataagtagtgtgtgttttaaaatgaaagtatatagatagtagtggtgatattagattgtatggaaaaaaagtaggtaggaatattaggggaatattataggaaattttattaaatgtaagtagtatgtaggtaatataaatggtgtattttgtgttagatagtggatatggtaatatggaagtggaaatagttgaagtggaggaggtaattgtagtaattaatataaatggggatgttgaaggggaatatggtggtagtgtatgggaggagtgtagtagtgtggatagtgttatagatagtgaaaattaggattttaaatttttaattgtataaattaaattattgttataatttaataataaaaaggttgtaatgttaatataatttaaagaaatatatggattattttttattgatttggtatgtatgtttaaaagtgataaaataatatgtatagattgggtggtagttatatttggagtatatttaattattgtagaaggatttaaaatattaattaataaatatgttttatatatatatatataaagtttagatataaaataaggagtattaattttaatgttaataagatatatatgtggaaaaaatagggttattgtaggaaagggattaagtatattgttatatgttttagaaagttgtatgtttttggagttttttaaattgtgtagttttgtagtagtattatattggtattgtataggtatatttaatattagtgtggtaataggggatatgttagaatggatataatgattaattgttatataatatggaatagatgatagtgtatttgatttattggatatggtataatgggtatttgataatgaatatattgatgaaagtgatatagtatttaattatgtaatgttagtagattgtaatagtaatgttgtagtttttttaaaaagtaattgttaggtaaaatatgtaaaagattgtgtaataatgtgtaaatattataagtgagtataaaaaaggtaaatgtttatgttttaatggataaaatttaggtgtagtaaatgtgatgaaggtggggattggagatttatagtataatttttaagatattaaggaatagaatttatattttttttatgtgtattaaaggaatttttaaagggtatttttaaaaaaaattgtatagttatatatggatttgtgaatataggaaagttatatttttgtatgagttttatgtattttttatagggtatagttattttatatgtaaattttattagttatttttggttagaattatttgtagatgtaaaattagtaatgttagatgatgtaattggtatttgttggttatattttgataattatatgagaaatgtattagatgggtatgtaataagtttagataggaaatataaaagtttattataaatgaaatgtttattattattaataatttttaatattaattttgtggaagatgataggtggttatatttatgtagtaggttaatagtgtttaaattttttaatgtatttttatttgattaaaataggaatttagtgtatataattaatgataaaaattggaaatgtttttttgaaaagatttggtgtagattagatttgtagtaggatgaggatgaaggagataatgatgaaaatatttttataatgtttaaatgtgttataggataaaatattagaatattatgaataagatagtaaattaatatatgattaaattaattattggaaatgtgtgtgaatggaaaatgtaatattttatgtagtatgagaatgtggtatgtatattattgattattaggtggtgttaattataaatattttaaaatgtaaagtatattaagttattgaattgtagatggtattagaaagtgttgtataaattgaatataatatagaggagtggatattaaaagatattagtaatgaattgtggtatatatagttaaaataatgttttaaaaaataaggaattatagtggaggtgtggtatgatggggataaatgtaatgttatgaattatgtattatggggtgttatatattataaaaataatatagatatatggtgtaaaatagaagggtgtgtggattattggggtatatattatatgaatgagtatttaaaagtatattatgaagtgtttatttaagatgtggaaaggtatgggattagtggtaaatgggaagtgtattataatggtaatataatttattgttttgattttatgtgtagtattagtgatggattggtatttattattgaatttattattgaattattaaatattattgtgatttattttattgtaataattttatgtatttaaaaaataattttgttgttgttttgaaagtgattttgatagtgtgtagttatagagtttattgagtttgatggagtgtttttggattattttaataatttattttatagtaatagtataggttataatataagatggtattttagttgtggtaatattatgtttataatatatttaaaaggtgataaaaatggtttaaaatgtttaagatatagattataaaaatatgatatattgtttgaaaatattttatgtatttggtattggatatggggtaagggaattaaaaatgttggtatattaattgttatatatgttatagagttataatgttaaaaatttttggatattgttaaaatattttttagtgtatatgttttattgggttatatgatattgtaaagtatattatggatattgtgtatgtatattgtatatatattatatagatgatattattggtatttttggtgtggtttggtgtgtgtatatatatatgttgtaatgttttgtttttgttgtttgtgtatgtgtgtgtgtatgtgtggataattgtgtttgtgtttatttttatatgtattatattattggaggtgttttttgtatatttattattttttgtattgtttatgtggttgttgtatagattggtaatggatatgatatagtattgtatatgtatgtgtattgtgtataattattgtatatagttttttatatttttttttgttattaataaatatggttttttattgtgttgttaggtgtaagtgtgtatttgtaattgatttatatagaatttgtaaataattgggtatttgtttattagatgttgttgataaagttgagggtattatatttgttgataaaattttatagtggattagtttaggtatatttttgggtgggttaggtataggtataggtattggtattgggggatgtataggatatatatttttggggggtaggtttaatattgttgtagatgtgttttttgtatgtttatttgtagttattgaatttgttggtttttttgagttatttattgtgtaattggtggaggatttaagtgttataatttttggaatattagtattaatatttataggtatttttggatttgaaattatttttttttttattattatgtttgtggtattggatattatatttttttttgggtttgtataaataatttttattagttatattaattttgtttttatggatttttttttaattgaggttttttaaataggtgaaattttgggtaatatatttgttagtatttttatattaggtatatatggttatgaggaaatatttatggaagtgtttgttatatatggtataggtattgaatttattagtagtatatttatatttggaattagttgtgtggtaggattatgtttatatagtagagtatattagtaggtttgtgttagtaattttgattttgtaatttattttttattatttgtaatatttgataattttgtttttgagtttgttgatattatattaatatatgaagttgttgatatagttttagatttggattttttggatattgtttgtttatataggtttgttttaattttgtgtaaaggaatagtaaggtttagtaggtttggtaaaaaggttattatggttatttggtgtggtatataaattggagtgtaagtatattattattatgatattagtagtattgtttttgttgaaagtattgaattatagtttttagtttatgttgagttttttgatgttttagatgtattatttgatatatatgttgatgtggataataatatatatttagatattgtatttaataatataagggatttgggtattatatataatataggtttattattttttgtggtttttttagtatttattaaatatgttaatataattattttttttagtattttatggaatatgtttgtaaatattggttttgatattgttttattaagtattattttatagttgttattggtgttttttggattaatagatataatatatgtaataattatttagggttttaattattatttgttgttattattgtatttttttttaaaaaaatgtaaatgtattttttatttttttttagatggttatgtggtggtttagtgatagtatggtgtatttgtttttattttttgtggtgaaggttgttaatattgatgattatgttatatgtataggtatatattattatgttggtagttttagattattaatagtaggatatttatattttaaagtgggtatgaatggtggttgtaagtaggatattttaaaggtgtttgtatattaatatagggtattttgtgtgatattgtttgattttaataaatttagtattttagatgtatttttatataatttagaaatataatgtttagtatgggtttgtgtaggggtggaggtgggtaggggttagttattgggtgttggtattagtggatatttattatataatagataggatgatattgaaaatttattatttttattaattattaataaggatagtagggataatgtgtttgtggattataaatagatatagttgtgtattataggttgtgtttttgttattggggagtattggggtaagggaaaggtatgtaagtttaataatgtatttatgggggattgtttttttttggaattagtaaatatttttattgaggatggtgatatgattgatattggttatggagttatggattttggtgtattgtaggaaattaaaagtgaggtgtttttagatatttgttaatttatttgtaaatattttgattatttgtaaatgtttgtagatgtgtatggggatagtatgtttttttgtttatgtagggaataattgtttgtaagatatttttggaattgtggtggtatggtgggtgatgttatttttgtttaattgtatattaagggtatagatatatgtgtaaattttggtagttttgtatattgttttttttttagtggttttatggtaatttttgatttttagttatttaataagttttattggttatataaggtttagggttataataatggtatatgttggtataattaattattttttattgttgtggatattatttgtagtattaattttatattatttatttttatagagttttttatattttttatatatgatttttttaagtttaaggaatatattaggtatgtggaggagtatgatttataatttatattttaattgtgtattgttatattaataattgatgttatgttttatatttatattatgaatttttttatattggataattggaattttgttgtagtttttttattatttgttagtttggtagatatttatagatatttatagtttgtagttattatatgttaaaaggatgttttagtatttgaaaagaaagatttatatgatggtttaaagttttggaatgttgatttaagggaaaagtttagtttggaatttgattaattttttttgggatgtaaatttttgttgtaggttagggtttgtaggtgttttattataggtttttgaaagtggtttgttgtatttatttttttgtttttagttattaaatataaatgtaaatgtgtgtttaaataatgtatgtgtatgttttgttatgtgtgtgtatgttgtttgtttttttatgtgttgagtgtatatgtgtatgtttgtaggtatgtgtgtatatgtttttgttaataaagtatgtatgatagttttatgtgtgattgtatattttgtgattaatagtgtatttgttttatatataataggtttgtaatattttatatataatttatatgttttattttaaggtgtgtttattatttaatatgtaatttttatattgttgtatgtgtttttatattttatattttgttattttgtggtgattgaagttggttgtgggttgagtattttttttaaattagtggaaattattttttttagtaaaaatatgtttttattttaggtttattttgtatagttggtattggtaatagttttattggtgtgttttattatttattattttgtttaggtgtattgtaataatattttggtaatatttatatttttattttatgtaataaaattgtttttaggtatatattttagttgtttttatttgtttaattaaatagttggtttgtataattattttttgatttaggaatgtgttttatagtataagttatataagtgattaatgtagtatataatagtttatgtaattgaaataggttgggtatatatatttatattttta

SEQ ID NO: 646 - DNA, 7833 bp, Papilloma virus
gaatattgtaaaatattcatagaacaaatttttttccctcattggcttttgccagtcctggctttagccacctatattttgcgtcagtgtcaaagacaggtatggctaccgcgctaaagtgttaggacgtcttgccggtatgtttaacggtctggacacgtgttgcgacctgtggtggaacgtcctgtaatgttatcggacacagataacgtctgctggtgatgtcgtttggctccatatacttaaacgtaaatcactaaatatacatcatatatccctgccccttggtgatcgacgtacggttagtacatattttaaaatacgattttatgccctcgatgctataatgagcctgagccacatacgttgatgtaatcttttatattgattatgtttcaatatattaaataattattccacgtacacaacagactttggcgacacaggtcgtctttttaattctgtggatttatcgtttgcttctaaagtattttatcgtccttcgatatgtcctgtcacagctgccacgacctggtgttttgccctcctggcgtctgattgtgcttctctttgggttcatattgtagtctatacgcacctggtttcgggtggaacgtcctttaacataatctaaatacaggaatgttactttatgtcggccaactggaacatacagtgctcgttaatcctctcagtctcctactttatctacttgggctggtacgtcaattagtggttgtagttgatgatcggtctgccctacttggtgtcgcagtgtgttatgtcacaagcacaacattcacattgttgtgtgacgtcgaccatcatcttcggagtgccctatgagacgctgttgatgtcgtcgacaaatacctgagtgatcctaaacacacaggcaccacacgttgacgtttggtcattggacgataccggttagcacttccatgtctgcccctacccagccctacattgcctaccaaagatcatgtccgttatcatctatttgtttgtccgctgtgtcacagcctcctactcctacttttacgttgtctatgtccaagtctggaccgtctgaaataactactaaggtgtctataaacacatgtccgtctcgcactctgtcgtgtccatgaaaatgtatacgttctccgggtttccctacgtgttcgtcacgcacggaattttgctttcatatgtctgtcgtcaccgctgtgatctggcatacctttttttcatccgtccttatggtccccttgtgatgtcctttaaagtaatttacattcgtcatgcgtccgttgtgtttgccacataaggcacggtctgtcgcctataccgttataccttcacctttgtcgacttcacctcctccattgacatcgttgattatgtttacccctacgacttccccttgtaccgccgtcacatgccctcctcacgtcatcacacctatcacgatatctatcacttttggtcctagggtttagaggttgacgtgtttaatttaataacaatgttaggttattgtttttccgacgttacgattgtgttaaatttctttgtatacctgataggaaatgactggaccatgcatgcaaattttcactattttgttgtacatgtctgacccaccgtcggtataaacctcatgtaggttgataacgtcttcctaaattttgtaattagttgtttatacggaatatatgtgtatatgtttcgaatctgtgttttgttcctcatgattaaaattacgattattctatatgtacaccttttttatcccaatgacatcctttccctaattcatgtaacaatgtacaaggtctttcaacatacgaagacctcggaggatttgacgcgtcgggacatcgtcgtgatataaccatagcgtgtccatataggttataatcacaccattgtcccctatgcggtcttacctatgttgctaattgacaatatgttgtaccttatctactatcacataaactggatagcctgtaccatgttacccgtaaactgttacttatatgactactttcactgtatcgtaaattaatacgttacaatcgtctaacattgtcattacgacgtcggaaaaatttttcattgacggtccgttttatacattttctaacacgttgttacacatttgtaatgttcgctcgtgttttttccgtttacaggtacagagttacctattttaaatccacatcatttacactacttccgcccctgacctctgggtatcatgttaagaattctatagttccttatcttaaatataggaaaaatacacgtaatttccttaaaaatttcccatgagggttttttttgacatatcaatatatacctggacgcttatgtcctttcagtgtaaaaacatactcggaatacgtaaaaaatgtcccgtgtcaataaagtatacatttgaggtggtcggtgaaaaccgatcttggtgaacgtctacgttttgatcgttacaatctactacgttggccatggacgaccagtataaagctattaatatactctttacgtaatctacccatacgttattcaaatctatcctttatattttcaaatgatgtttactttacaggtggtaataattattggaggttatggttaggacaccttctgctatccaccggtataaatgcatcatccgattgtcacaaatttaaaggattacgtaaaggtaaactggttttgtccttaggtcacatgtgttagttactatttttgacctttacaaaaaaacttttctgaaccacgtctaatctgaacgtcgtcctgctcctacttcctctgttactacttttgtgaaagtgttgcaaatttacacaatgtcctgttttatgatcttatgatacttgttctgtcatttagttatatactagtttaattaataacctttacacacgcttaccttttacgttataaaatacgtcgtgctcttgcaccgtacgtatgataactggtggtccaccacggttggtatttgtaaagttttacatttcgtatagttcgataacttgacgtctaccgtgatctttcacaacgtgtttgacttatgttatgtctcctcacctgtaattttctgtgatcattacttgacaccgtatgtgtcggttttgttacaaaattttttgttccttgatgtcacctccacaccatactacccctgtttacattacgatacttgatacataataccccacgatatataatatttttattatatctgtataccacattttgtcttcccacacacctgataaccccatatataatatacttgctcgtggattttcatatgatacttcacaaataagttctacgcctttccataccctgatcaccgtttacccttcacgtaatattaccgttgtattaagtaacaggactgagatacacgtcatggtcactgcctagccatgggtgatgacttgaatgatggcttaatagtttgtggtggcgctgggtaaggtggcgttgttggggtacgtgggttttttgttagggcggcggcagagctttcgctggagctgtcacacgtcagtgtctcgggtgactcgggctgcctcacagggacctggtagaattgttgggtgaggtgtcattgtcatgtccggtgttgtgttctgccatggagtcaacaccattgtgatgcggatattatgtaaattttccactgtttttaccaaattttacaaattctatatctgatgtttttatactgtgtaacaaacttttataaagtacatggaccgtaacctatgccccattcccttggtttttgcgaccgtataattgacaatgtatacggtgtctcagtgttgcggtttttaaaaacctgtgacaattttatggaagatcacatgtacaaagtaacccaatgtactgtaacatttcatatgatacctataacacatacatataacatatgtatgatgtatctactataataaccataaaaaccacaccaaaccacacacatatatatatacaacgttacagggcgaaaacggcagacacgtacacacacgcatacacacctattaacacaaacacaaataagaatatgcatggtgtggtaacctccacaaaaaacatataaatgataaaaaacataacgggtacaccaacaacgtatctgaccgttacctatactatatcatgacatatacatacacgtaacacgtattgatgacatgtatcgaaaaatataaaaaaaaacaatgattatttgtaccaaagggtggcacgacggtccgcattcgcacgtagacgttgactggatatatcttggacatttgttagcccatggacaggtggtctgcaacaactatttcaactcccatgatgtgaacgactgttttaaaatgtcacctgatcaaatccatataaaaacccacccaatccgtatccgtgtccatgaccatgaccccctgcgtgtcctatatatggggaccccccatccggattatgacaacatctacacagaggacgtgcaggtggacatcaataacttggacaaccaggaagactcggtagataacacgttaaccacctcctgagttcacaatattggagaccttgtggtcatggttgtaaatgtccgtggagacctaaactttaatgaagaagaagatgatgatgcggacgccataacctataatgtgggaggagacccagacatgtttattggagatgatcaatatgattgggacggaaatgcctaggaaggaattaactccaaggggtttgtccactttggagcccattatataaacagtcatggggatgtagtccatgtgtaccgatactcctttatggataccttcacaaacggtgtgtaccgtgtccatggcttggataatcgtcgtgtggatgtggaccttagtcagcacaccgtcctggtgcaaatatatcatctcgtgtagtcgtccaagcacaatcattaaaactaaaacattgagtgggaagtagtaaacattgtaaactattaggacgaaaactcggacaactatgatgtaattgtatacttcgacgactgtatcgaggtctaggcctaaaagacctgtaacaagcaaatgtatccggacggaattggagcgcatttccttgtcattccaaatcatccgaaccgtttttccgatggtaccaatgggccgcaccgtgtgtttaacctcgcgttcatgtaataatggtactgtaatcatcataacgaggacgactttcgtaacttaatgtcggggatcaagtgcgactcgggagactacgaagtctacgtaataaactatatatacgactacacctgttattgtgtataaatctatgacgtaaattattatgttccctaagcccgtgatgtatattgtgtccgagtgatggaagacaccgaagaagtcgtagatgatttatacggttatgttgataaggaaaatcatggagtaccttatacggacatttatgaccaggactataacgaaatggttcatgatgaggtgtcaacggtaaccacggaagacctggttatctgtgttgtatacgttattggtaagtcccaaggttaataataaacaacggtaataacataaaaaaggatttttttgcatttgcataagggataaaaaaaagtctaccgatacaccgccagatcactgtcgtaccacataaacggaggtggaagacaccgcttccaacagttatgactactaatacaatgtgcgtgtccgtatataataatacgaccgtcgagatctaataattgtcatcctgtaggtataaaatttcacccatacttaccaccagcgttcgtcctgtaaggtttccacagacgtatagttatatcccataaagcgcactgtaacgggctaggattatttaagtcataaggtctacgtaggaatatattaggtctttgtgttgcaaatcatacccgaacacatccccacctccacccgtccccggtcggtaacccacaaccataatcacctgtgggtaatatattatctgtcctactatgacttttgagtggtaaaagtagttggtggttattcctgtcatccctattacacagacacctaatatttgtctgtgtcaacacgtaatatccgacacaagggcggtaacccctcgtgaccccattccctttccgtacgttcgggttattacatagatgccccctgacaggaggaaaccttgatcatttgtggggataactcctaccactatactaactatgaccgatacctcgatacctgaaaccacgtaacgtcctttggttttcactccacggaaatctataaacagttaggtaaacatttataggactaataaacgtttacagacgtctacacatacccctgtcatacaagaagacaaatgcatcccttgttgacaaacgttctgtaaaaaccttagcaccaccataccacccactgcggtaaggacgggttaacatataattcccgtgtctatatgcacgtttggggccatcaagacatatgacggggagagggtcgccaaggtaccattggagactaagggtcaataaattattcggaataaccgatgtattccgggtcccggtgttgttaccatatacaaccgtattagttaataaagaatgacaacacctgtgatgggcatcatggttgaaatgtaatagatggagatatctcagaaggtatggaagatgtatactaggaagattcaaattccttatatggtccgtgcacctcctcatactaaatgttaaatataaagttgacacatgacagtgtaattgttgactacaatacagaatataagtgtgatacttaaggagatataacctgttaaccttaaaacgacatcgaggaggtggtagacggtcaaaccatctgtgaatgtctatggatgtcagacgtcggtaatgtacagttttcctacgaggtcgtggacttttctttctaggtatactgccagatttcaaaaccttacaactgaattcccttttcaaatcaaaccttgaactagttaagggaaaccctgcatttaaaaacaacgtccggtcccaggcgtccgcgggatgatatccaggggctttcgccggacgacgtaggtgaaggagcaggagtcgatgatttgtgtttgcatttgcacacagatttattacgtacacatacggaacaatacacacacatacaacaaacaaaggaatacacaactcacatatacacatacaaacatccatacacacatatacaaaaacaattatttcatacatactgtcaaagtacacactaacgtgtgggacactgattgtcacataaacaaaatgtatattatccagacgttgtaaagtatgtattagatatacgggatgggattccacacaaatgatggattatacattaaaaatgtaacaacatacgcaaagatgtaaaatatgaagcggtaaaacaccgctggcttcagccagcacccaactcgtaaaaaaaatttgatcacctttggtggaaagagtcgtttttgtacagaaatggaatccaagtgggacgtatcaaccgtgaccattgtcaaaatgaccgcgcggaataatgagtagtaggacaggtccacgtgacgttgttatgaaaccgttgtaggtatagaggtgggatacattattttgacgaaaatccgtatataaaatcgacaaaaatgaacgaattaatttatcaaccggacatattgatgaaaaactaagtccttacacagaatgtcatattcaatatgttcactgattacatcgtgtgttatcaaatacgttggctttatccaacccgtatgtatggatatgaaaat

SEQ ID NO: 647 - DNA, 7833 bp, Papilloma virus
gaatattgtaaaatattuatagaauaaatttttttuuutuattgguttttguuagtuutggutttaguuauutatattttgugtuagtgtuaaagauaggtatggutauugugutaaagtgttaggaugtuttguuggtatgtttaauggtutggauaugtgttgugauutgtggtggaaugtuutgtaatgttatuggauauagataaugtutgutggtgatgtugtttggutuuatatauttaaaugtaaatuautaaatatauatuatatatuuutguuuuttggtgatugaugtauggttagtauatattttaaaataugattttatguuutugatgutataatgaguutgaguuauataugttgatgtaatuttttatattgattatgtttuaatatattaaataattattuuaugtauauaauagautttggugauauaggtugtutttttaattutgtggatttatugtttguttutaaagtattttatugtuuttugatatgtuutgtuauagutguuaugauutggtgttttguuutuutggugtutgattgtguttututttgggttuatattgtagtutatauguauutggtttugggtggaaugtuutttaauataatutaaatauaggaatgttautttatgtugguuaautggaauatauagtgutugttaatuututuagtutuutautttatutauttgggutggtaugtuaattagtggttgtagttgatgatuggtutguuutauttggtgtuguagtgtgttatgtuauaaguauaauattuauattgttgtgtgaugtugauuatuatuttuggagtguuutatgagaugutgttgatgtugtugauaaatauutgagtgatuutaaauauauagguauuauaugttgaugtttggtuattggaugatauuggttaguauttuuatgtutguuuutauuuaguuutauattguutauuaaagatuatgtuugttatuatutatttgtttgtuugutgtgtuauaguutuutautuutauttttaugttgtutatgtuuaagtutggauugtutgaaataautautaaggtgtutataaauauatgtuugtutuguaututgtugtgtuuatgaaaatgtataugttutuugggtttuuutaugtgttugtuauguauggaattttgutttuatatgtutgtugtuauugutgtgatutgguatauutttttttuatuugtuuttatggtuuuuttgtgatgtuutttaaagtaatttauattugtuatgugtuugttgtgtttguuauataagguauggtutgtuguutatauugttatauuttuauutttgtugauttuauutuutuuattgauatugttgattatgtttauuuutaugauttuuuuttgtauuguugtuauatguuutuutuaugtuatuauauutatuaugatatutatuauttttggtuutagggtttagaggttgaugtgtttaatttaataauaatgttaggttattgtttttuugaugttaugattgtgttaaatttutttgtatauutgataggaaatgautggauuatguatguaaattttuautattttgttgtauatgtutgauuuauugtuggtataaauutuatgtaggttgataaugtuttuutaaattttgtaattagttgtttatauggaatatatgtgtatatgtttugaatutgtgttttgttuutuatgattaaaattaugattattutatatgtauauuttttttatuuuaatgauatuutttuuutaattuatgtaauaatgtauaaggtutttuaauataugaagauutuggaggatttgaugugtugggauatugtugtgatataauuatagugtgtuuatataggttataatuauauuattgtuuuutatguggtuttauutatgttgutaattgauaatatgttgtauuttatutautatuauataaautggataguutgtauuatgttauuugtaaautgttauttatatgautautttuautgtatugtaaattaataugttauaatugtutaauattgtuattaugaugtuggaaaaatttttuattgauggtuugttttatauattttutaauaugttgttauauatttgtaatgttugutugtgttttttuugtttauaggtauagagttauutattttaaatuuauatuatttauautauttuuguuuutgauututgggtatuatgttaagaattutatagttuuttatuttaaatataggaaaaatauaugtaatttuuttaaaaatttuuuatgagggttttttttgauatatuaatatatauutggauguttatgtuutttuagtgtaaaaauatautuggaataugtaaaaaatgtuuugtgtuaataaagtatauatttgaggtggtuggtgaaaauugatuttggtgaaugtutaugttttgatugttauaatutautaugttgguuatggaugauuagtataaagutattaatataututttaugtaatutauuuataugttattuaaatutatuutttatattttuaaatgatgtttautttauaggtggtaataattattggaggttatggttaggauauuttutgutatuuauuggtataaatguatuatuugattgtuauaaatttaaaggattaugtaaaggtaaautggttttgtuuttaggtuauatgtgttagttautatttttgauutttauaaaaaaauttttutgaauuaugtutaatutgaaugtugtuutgutuutauttuututgttautauttttgtgaaagtgttguaaatttauauaatgtuutgttttatgatuttatgatauttgttutgtuatttagttatatautagtttaattaataauutttauauauguttauuttttaugttataaaataugtugtgututtguauugtaugtatgataautggtggtuuauuauggttggtatttgtaaagttttauatttugtatagttugataauttgaugtutauugtgatutttuauaaugtgtttgauttatgttatgtutuutuauutgtaattttutgtgatuattauttgauauugtatgtgtuggttttgttauaaaattttttgttuuttgatgtuauutuuauauuatautauuuutgtttauattaugatauttgatauataatauuuuaugatatataatatttttattatatutgtatauuauattttgtuttuuuauauauutgataauuuuatatataatatauttgutugtggattttuatatgatauttuauaaataagttutauguutttuuatauuutgatuauugtttauuuttuaugtaatattauugttgtattaagtaauaggautgagatauaugtuatggtuautguutaguuatgggtgatgauttgaatgatgguttaatagtttgtggtggugutgggtaaggtggugttgttggggtaugtgggttttttgttaggguggugguagagutttugutggagutgtuauaugtuagtgtutugggtgautugggutguutuauagggauutggtagaattgttgggtgaggtgtuattgtuatgtuuggtgttgtgttutguuatggagtuaauauuattgtgatguggatattatgtaaattttuuautgtttttauuaaattttauaaattutatatutgatgtttttatautgtgtaauaaauttttataaagtauatggauugtaauutatguuuuattuuuttggtttttgugauugtataattgauaatgtatauggtgtutuagtgttguggtttttaaaaauutgtgauaattttatggaagatuauatgtauaaagtaauuuaatgtautgtaauatttuatatgatauutataauauatauatataauatatgtatgatgtatutautataataauuataaaaauuauauuaaauuauauauatatatatatauaaugttauagggugaaaaugguagauaugtauauauauguatauauauutattaauauaaauauaaataagaatatguatggtgtggtaauutuuauaaaaaauatataaatgataaaaaauataaugggtauauuaauaaugtatutgauugttauutatautatatuatgauatatauatauaugtaauaugtattgatgauatgtatugaaaaatataaaaaaaaauaatgattatttgtauuaaagggtgguaugauggtuuguattuguaugtagaugttgautggatatatuttggauatttgttaguuuatggauaggtggtutguaauaautatttuaautuuuatgatgtgaaugautgttttaaaatgtuauutgatuaaatuuatataaaaauuuauuuaatuugtatuugtgtuuatgauuatgauuuuutgugtgtuutatatatggggauuuuuuatuuggattatgauaauatutauauagaggaugtguaggtggauatuaataauttggauaauuaggaagautuggtagataauaugttaauuauutuutgagttuauaatattggagauuttgtggtuatggttgtaaatgtuugtggagauutaaautttaatgaagaagaagatgatgatguggauguuataauutataatgtgggaggagauuuagauatgtttattggagatgatuaatatgattgggauggaaatguutaggaaggaattaautuuaaggggtttgtuuautttggaguuuattatataaauagtuatggggatgtagtuuatgtgtauugatautuutttatggatauuttuauaaauggtgtgtauugtgtuuatgguttggataatugtugtgtggatgtggauuttagtuaguauauugtuutggtguaaatatatuatutugtgtagtugtuuaaguauaatuattaaaautaaaauattgagtgggaagtagtaaauattgtaaautattaggaugaaaautuggauaautatgatgtaattgtatauttugaugautgtatugaggtutagguutaaaagauutgtaauaaguaaatgtatuuggauggaattggaguguatttuuttgtuattuuaaatuatuugaauugtttttuugatggtauuaatggguuguauugtgtgtttaauutugugttuatgtaataatggtautgtaatuatuataaugaggaugautttugtaauttaatgtuggggatuaagtgugautugggagautaugaagtutaugtaataaautatatataugautauauutgttattgtgtataaatutatgaugtaaattattatgttuuutaaguuugtgatgtatattgtgtuugagtgatggaagauauugaagaagtugtagatgatttatauggttatgttgataaggaaaatuatggagtauuttatauggauatttatgauuaggautataaugaaatggttuatgatgaggtgtuaauggtaauuauggaagauutggttatutgtgttgtataugttattggtaagtuuuaaggttaataataaauaauggtaataauataaaaaaggatttttttguatttguataagggataaaaaaaagtutauugatauauuguuagatuautgtugtauuauataaauggaggtggaagauauuguttuuaauagttatgautautaatauaatgtgugtgtuugtatataataataugauugtugagatutaataattgtuatuutgtaggtataaaatttuauuuatauttauuauuagugttugtuutgtaaggtttuuauagaugtatagttatatuuuataaaguguautgtaaugggutaggattatttaagtuataaggtutaugtaggaatatattaggtutttgtgttguaaatuatauuugaauauatuuuuauutuuauuugtuuuuggtuggtaauuuauaauuataatuauutgtgggtaatatattatutgtuutautatgauttttgagtggtaaaagtagttggtggttattuutgtuatuuutattauauagauauutaatatttgtutgtgtuaauaugtaatatuugauauaaggguggtaauuuutugtgauuuuattuuutttuugtaugttugggttattauatagatguuuuutgauaggaggaaauuttgatuatttgtggggataautuutauuautatautaautatgauugatauutugatauutgaaauuaugtaaugtuutttggttttuautuuauggaaatutataaauagttaggtaaauatttataggautaataaaugtttauagaugtutauauatauuuutgtuatauaagaagauaaatguatuuuttgttgauaaaugttutgtaaaaauuttaguauuauuatauuauuuautguggtaaggaugggttaauatataattuuugtgtutatatguaugtttgggguuatuaagauatatgauggggagagggtuguuaaggtauuattggagautaagggtuaataaattattuggaataauugatgtattuugggtuuuggtgttgttauuatatauaauugtattagttaataaagaatgauaauauutgtgatggguatuatggttgaaatgtaatagatggagatatutuagaaggtatggaagatgtatautaggaagattuaaattuuttatatggtuugtguauutuutuatautaaatgttaaatataaagttgauauatgauagtgtaattgttgautauaatauagaatataagtgtgatauttaaggagatataauutgttaauuttaaaaugauatugaggaggtggtagauggtuaaauuatutgtgaatgtutatggatgtuagaugtuggtaatgtauagttttuutaugaggtugtggauttttutttutaggtatautguuagatttuaaaauuttauaautgaattuuuttttuaaatuaaauuttgaautagttaagggaaauuutguatttaaaaauaaugtuuggtuuuaggugtuugugggatgatatuuaggggutttuguuggaugaugtaggtgaaggaguaggagtugatgatttgtgtttguatttguauauagatttattaugtauauatauggaauaatauauauauatauaauaaauaaaggaatauauaautuauatatauauatauaaauatuuatauauauatatauaaaaauaattatttuatauatautgtuaaagtauauautaaugtgtgggauautgattgtuauataaauaaaatgtatattatuuagaugttgtaaagtatgtattagatataugggatgggattuuauauaaatgatggattatauattaaaaatgtaauaauatauguaaagatgtaaaatatgaaguggtaaaauauugutgguttuaguuaguauuuaautugtaaaaaaaatttgatuauutttggtggaaagagtugtttttgtauagaaatggaatuuaagtgggaugtatuaauugtgauuattgtuaaaatgauuguguggaataatgagtagtaggauaggtuuaugtgaugttgttatgaaauugttgtaggtatagaggtgggatauattattttgaugaaaatuugtatataaaatugauaaaaatgaaugaattaatttatuaauuggauatattgatgaaaaautaagtuuttauauagaatgtuatattuaatatgttuautgattauatugtgtgttatuaaataugttggutttatuuaauuugtatgtatggatatgaaaat

SEQ ID NO: 648 - DNA, 7833 bp, Papilloma virus
gaatattgtaaaatatttatagaataaattttttttttttattggtttttgttagttttggttttagttatttatattttgtgttagtgttaaagataggtatggttattgtgttaaagtgttaggatgttttgttggtatgtttaatggtttggatatgtgttgtgatttgtggtggaatgttttgtaatgttattggatatagataatgtttgttggtgatgttgtttggttttatatatttaaatgtaaattattaaatatatattatatatttttgttttttggtgattgatgtatggttagtatatattttaaaatatgattttatgtttttgatgttataatgagtttgagttatatatgttgatgtaattttttatattgattatgttttaatatattaaataattattttatgtatataatagattttggtgatataggttgtttttttaattttgtggatttattgtttgtttttaaagtattttattgttttttgatatgttttgttatagttgttatgatttggtgttttgtttttttggtgtttgattgtgtttttttttgggtttatattgtagtttatatgtatttggttttgggtggaatgttttttaatataatttaaatataggaatgttattttatgttggttaattggaatatatagtgtttgttaatttttttagttttttattttatttatttgggttggtatgttaattagtggttgtagttgatgattggtttgttttatttggtgttgtagtgtgttatgttataagtataatatttatattgttgtgtgatgttgattattatttttggagtgttttatgagatgttgttgatgttgttgataaatatttgagtgattttaaatatataggtattatatgttgatgtttggttattggatgatattggttagtatttttatgtttgtttttatttagttttatattgtttattaaagattatgtttgttattatttatttgtttgtttgttgtgttatagttttttatttttatttttatgttgtttatgtttaagtttggattgtttgaaataattattaaggtgtttataaatatatgtttgttttgtattttgttgtgtttatgaaaatgtatatgttttttgggtttttttatgtgtttgttatgtatggaattttgtttttatatgtttgttgttattgttgtgatttggtatattttttttttatttgtttttatggtttttttgtgatgttttttaaagtaatttatatttgttatgtgtttgttgtgtttgttatataaggtatggtttgttgtttatattgttatatttttatttttgttgattttattttttttattgatattgttgattatgtttatttttatgatttttttttgtattgttgttatatgttttttttatgttattatatttattatgatatttattatttttggttttagggtttagaggttgatgtgtttaatttaataataatgttaggttattgtttttttgatgttatgattgtgttaaatttttttgtatatttgataggaaatgattggattatgtatgtaaatttttattattttgttgtatatgtttgatttattgttggtataaattttatgtaggttgataatgtttttttaaattttgtaattagttgtttatatggaatatatgtgtatatgttttgaatttgtgttttgttttttatgattaaaattatgattattttatatgtatattttttttattttaatgatattttttttttaatttatgtaataatgtataaggttttttaatatatgaagattttggaggatttgatgtgttgggatattgttgtgatataattatagtgtgtttatataggttataattatattattgttttttatgtggttttatttatgttgttaattgataatatgttgtattttatttattattatataaattggatagtttgtattatgttatttgtaaattgttatttatatgattatttttattgtattgtaaattaatatgttataattgtttaatattgttattatgatgttggaaaaattttttattgatggtttgttttatatattttttaatatgttgttatatatttgtaatgtttgtttgtgttttttttgtttataggtatagagttatttattttaaatttatattatttatattatttttgtttttgatttttgggtattatgttaagaattttatagttttttattttaaatataggaaaaatatatgtaatttttttaaaaattttttatgagggttttttttgatatattaatatatatttggatgtttatgtttttttagtgtaaaaatatatttggaatatgtaaaaaatgttttgtgttaataaagtatatatttgaggtggttggtgaaaattgattttggtgaatgtttatgttttgattgttataatttattatgttggttatggatgattagtataaagttattaatatattttttatgtaatttatttatatgttatttaaatttattttttatatttttaaatgatgtttattttataggtggtaataattattggaggttatggttaggatattttttgttatttattggtataaatgtattatttgattgttataaatttaaaggattatgtaaaggtaaattggttttgtttttaggttatatgtgttagttattatttttgatttttataaaaaaatttttttgaattatgtttaatttgaatgttgttttgtttttattttttttgttattatttttgtgaaagtgttgtaaatttatataatgttttgttttatgattttatgatatttgttttgttatttagttatatattagtttaattaataatttttatatatgtttattttttatgttataaaatatgttgtgtttttgtattgtatgtatgataattggtggtttattatggttggtatttgtaaagttttatattttgtatagtttgataatttgatgtttattgtgattttttataatgtgtttgatttatgttatgtttttttatttgtaattttttgtgattattatttgatattgtatgtgttggttttgttataaaattttttgttttttgatgttatttttatattatattatttttgtttatattatgatatttgatatataatattttatgatatataatatttttattatatttgtatattatattttgtttttttatatatttgataattttatatataatatatttgtttgtggatttttatatgatattttataaataagttttatgtttttttatattttgattattgtttattttttatgtaatattattgttgtattaagtaataggattgagatatatgttatggttattgtttagttatgggtgatgatttgaatgatggtttaatagtttgtggtggtgttgggtaaggtggtgttgttggggtatgtgggttttttgttagggtggtggtagagtttttgttggagttgttatatgttagtgttttgggtgatttgggttgttttatagggatttggtagaattgttgggtgaggtgttattgttatgtttggtgttgtgttttgttatggagttaatattattgtgatgtggatattatgtaaattttttattgtttttattaaattttataaattttatatttgatgtttttatattgtgtaataaatttttataaagtatatggattgtaatttatgttttatttttttggtttttgtgattgtataattgataatgtatatggtgttttagtgttgtggtttttaaaaatttgtgataattttatggaagattatatgtataaagtaatttaatgtattgtaatattttatatgatatttataatatatatatataatatatgtatgatgtatttattataataattataaaaattatattaaattatatatatatatatatataatgttatagggtgaaaatggtagatatgtatatatatgtatatatatttattaatataaatataaataagaatatgtatggtgtggtaatttttataaaaaatatataaatgataaaaaatataatgggtatattaataatgtatttgattgttatttatattatattatgatatatatatatatgtaatatgtattgatgatatgtattgaaaaatataaaaaaaaataatgattatttgtattaaagggtggtatgatggtttgtatttgtatgtagatgttgattggatatattttggatatttgttagtttatggataggtggtttgtaataattattttaatttttatgatgtgaatgattgttttaaaatgttatttgattaaatttatataaaaatttatttaatttgtatttgtgtttatgattatgattttttgtgtgttttatatatggggattttttatttggattatgataatatttatatagaggatgtgtaggtggatattaataatttggataattaggaagatttggtagataatatgttaattattttttgagtttataatattggagattttgtggttatggttgtaaatgtttgtggagatttaaattttaatgaagaagaagatgatgatgtggatgttataatttataatgtgggaggagatttagatatgtttattggagatgattaatatgattgggatggaaatgtttaggaaggaattaattttaaggggtttgtttattttggagtttattatataaatagttatggggatgtagtttatgtgtattgatatttttttatggatatttttataaatggtgtgtattgtgtttatggtttggataattgttgtgtggatgtggattttagttagtatattgttttggtgtaaatatattattttgtgtagttgtttaagtataattattaaaattaaaatattgagtgggaagtagtaaatattgtaaattattaggatgaaaatttggataattatgatgtaattgtatattttgatgattgtattgaggtttaggtttaaaagatttgtaataagtaaatgtatttggatggaattggagtgtatttttttgttattttaaattatttgaattgtttttttgatggtattaatgggttgtattgtgtgtttaattttgtgtttatgtaataatggtattgtaattattataatgaggatgatttttgtaatttaatgttggggattaagtgtgatttgggagattatgaagtttatgtaataaattatatatatgattatatttgttattgtgtataaatttatgatgtaaattattatgttttttaagtttgtgatgtatattgtgtttgagtgatggaagatattgaagaagttgtagatgatttatatggttatgttgataaggaaaattatggagtattttatatggatatttatgattaggattataatgaaatggtttatgatgaggtgttaatggtaattatggaagatttggttatttgtgttgtatatgttattggtaagttttaaggttaataataaataatggtaataatataaaaaaggatttttttgtatttgtataagggataaaaaaaagtttattgatatattgttagattattgttgtattatataaatggaggtggaagatattgtttttaatagttatgattattaatataatgtgtgtgtttgtatataataatatgattgttgagatttaataattgttattttgtaggtataaaattttatttatatttattattagtgtttgttttgtaaggtttttatagatgtatagttatattttataaagtgtattgtaatgggttaggattatttaagttataaggtttatgtaggaatatattaggtttttgtgttgtaaattatatttgaatatatttttatttttatttgtttttggttggtaatttataattataattatttgtgggtaatatattatttgttttattatgatttttgagtggtaaaagtagttggtggttatttttgttatttttattatatagatatttaatatttgtttgtgttaatatgtaatatttgatataagggtggtaattttttgtgattttattttttttttgtatgtttgggttattatatagatgttttttgataggaggaaattttgattatttgtggggataatttttattattatattaattatgattgatattttgatatttgaaattatgtaatgttttttggtttttattttatggaaatttataaatagttaggtaaatatttataggattaataaatgtttatagatgtttatatatatttttgttatataagaagataaatgtattttttgttgataaatgttttgtaaaaattttagtattattatattatttattgtggtaaggatgggttaatatataatttttgtgtttatatgtatgtttggggttattaagatatatgatggggagagggttgttaaggtattattggagattaagggttaataaattatttggaataattgatgtattttgggttttggtgttgttattatatataattgtattagttaataaagaatgataatatttgtgatgggtattatggttgaaatgtaatagatggagatattttagaaggtatggaagatgtatattaggaagatttaaattttttatatggtttgtgtatttttttatattaaatgttaaatataaagttgatatatgatagtgtaattgttgattataatatagaatataagtgtgatatttaaggagatataatttgttaattttaaaatgatattgaggaggtggtagatggttaaattatttgtgaatgtttatggatgttagatgttggtaatgtatagtttttttatgaggttgtggatttttttttttaggtatattgttagattttaaaattttataattgaattttttttttaaattaaattttgaattagttaagggaaattttgtatttaaaaataatgtttggttttaggtgtttgtgggatgatatttaggggtttttgttggatgatgtaggtgaaggagtaggagttgatgatttgtgtttgtatttgtatatagatttattatgtatatatatggaataatatatatatatataataaataaaggaatatataatttatatatatatatataaatatttatatatatatatataaaaataattattttatatatattgttaaagtatatattaatgtgtgggatattgattgttatataaataaaatgtatattatttagatgttgtaaagtatgtattagatatatgggatgggattttatataaatgatggattatatattaaaaatgtaataatatatgtaaagatgtaaaatatgaagtggtaaaatattgttggttttagttagtatttaatttgtaaaaaaaatttgattatttttggtggaaagagttgtttttgtatagaaatggaatttaagtgggatgtattaattgtgattattgttaaaatgattgtgtggaataatgagtagtaggataggtttatgtgatgttgttatgaaattgttgtaggtatagaggtgggatatattattttgatgaaaatttgtatataaaattgataaaaatgaatgaattaatttattaattggatatattgatgaaaaattaagtttttatatagaatgttatatttaatatgtttattgattatattgtgtgttattaaatatgttggttttatttaatttgtatgtatggatatgaaaat

SEQ ID NO: 649 - DNA, 7858 bp, Papilloma virus
aatacttttaacaattatactacataaaaaagggtgtaaccgaaaacggttgcaaccaaaaacggtgcatataaaagctttgtggaaaagtgcattacaggatggcgcgctttgacgatccaaagcaacgaccctacaagctaccagatttgtgcacagaattgaatacatcactacaagacgtatctattgcctgtgtatattgcaaagcaacattggaacgcacagaggtatatcaatttgcttttaaagatttatgtatagtgtatagagactgtatagcatatgctgcatgccataaatgtatagacttttattccagaattagagaattaagatattattcaaactctgtatatggagagacactggaaaaaataactaatacagagttgtataatttgttaataaggtgcctgcggtgccagaaaccattgaacccagcagaaaaacgtagacaccttaaggacaaacgaagatttcacagcatagctggacagtaccgagggcagtgtaatacatgttgtgaccaggcacggcaagaaagacttcgcagacgtagggaaacacaagtatagcaataagtatgcatggaccccgggaaacactgcaagaaattgtattgcatttggaacctcagaatgaattagatcctgttgacctgttgtgttacgagcaattaagcgagtcagaggaggaaaacgatgaagcagatggagttagtcatgcacaactaccagcccgacgagccgaaccacagcgtcacaaaattttgtgtgtatgttgtaagtgtgacggcagaattgagcttacagtagagagctcggcagaggaccttagaacactacagcagctgtttttgagcaccttgtcctttgtgtgtccgtggtgtgcaactaaccaataatctacaatggcggatccagaaggtaccgacggggagggaacggggtgtaatggctggttctttgtagaaacaattgtagagaaaaaaacaggggatgtaatatcagatgatgaggatgaaactgcaacagatacagggtcggatatggtagattttattgacacacaattatccatttgtgaacaggcagagcaagagacagcacaggcattgttccatgcgcaggaagttcagaatgatgcacaggtgttgcatcttttaaaacgaaagtttgcaggaggcagcaaggaaaacagtccattaggggagcagctaagtgtggatacggatctaagtccacggttacaagaaatttcattaaatagtgggcacaaaaaagcaaaacgacggttgtttacaatatcagatagtggctatggctgttctgaagtggaagctgcagagactcaggtaactgtaaacactaatgcggaaaatggcggcagtgtacatagtacacaaagtagtggtggggatagtagtgacaatgcagaaaatgtagatccgcattgcagtattacagaactaaaggagctattacaagcaagtaacaaaaaggctgcaatgctggcagtatttaaagacatatatgggctgtcatttacggatttggttagaaattttaaaagtgataaaacaacatgtacagattgggtaatggctatatttggagttaatccaacggtagcagaaggctttaaaacattaattaaaccagcaacgttatacgcccatatccaatgtttagattgtaaatggggagtattaatattagctttattaagatataaatgtggcaaaaatagactaactgttgcaaaaggcttaagcacattgttgcacgtacctgaaacatgtatgttaattgaaccaccaaaattgcgaagtagtgttgcagcattatactggtatagaacaggtatatccaatattagtgaagtaagtggagacacacctgagtggatacaaagactgacaattattcaacatggtattgacgatagtaattttgatttgtcagacatggtgcaatgggcatttgataatgaccttacagatgaaagtgatatggcatttcaatatgcccaattagcagactgcaacagtaatgcagctgcatttttaaaaagtaactgccaagccaaatatttaaaagattgtgctgtaatgtgtagacattataaaagagcacaaaaacgccaaatgaatatgtctcaatggattaaatatagatgttccaaaatagatgaaggtggggattggagacccatagtacaattcctaagatatcagggagtagaatttattagctttttaagggcactaaaggaatttcttaaaggaacaccaaaaaaaaattgtatactgttatatggacctgcaaatacaggaaaatcgtattttggaatgagttttatacatttcctacaaggtgcaataatatcatttgtaaattcaaacagccatttttggttagaaccgttagcagatactaaggtagccatgttggatgatgccacacacacgtgttggacatattttgataattatatgagaaatgcattagatggtaatcctataagtatagacagaaagcataaaccattattacagctaaaatgtcctccaatcctattaacatccaatattgatccagcaaaagataataaatggccatatttagaaagtagggtgacggtatttacatttccacatgcatttccatttgataaaaatggtaatccagtatatgaaataaatgataaaaattggaaatgtttttttgaaaggacatggtccagattagatttgcacgaggacgatgaagatgcagacaccgaaggaatccctttcggaacgtttaagtgcgttacaggacaaaatactagaccactatgaaaatgacagtaaagacataaacagccaaataagttattggcaacttatacgtttggaaaatgcaatactatttacagcaagggaacatggtattaccaaactaaaccaccaggtggtgcctcctattaacatttcaaaaagcaaagcacataaagctattgaactgcaaatggccttaaagggccttgcacaaagcaagtataacaatgaggaatggacactgcaagatacatgcgaggaactatggaatacagaaccgtcgcagtgttttaaaaaaggcggtaaaaccgtgcacgtatactttgatggcaacaaggacaactgtatgaactatgtagtatgggacagtatatattatataactgagacagggatatgggacaaaacagcagcatgtgttagctattggggtgtatattatataaaagatggagataccacatattatgtacaatttaaaagcgaatgtgagaaatatggaaatagtaatacgtgggaagtacaatatgggggcaatgtaattgattgtaatgactctatgtgcagtaccagtgacgacacggtatccgctactcagattgttagacagctacaacacgcctccacgtcgacccccaaaaccgcatccgtgggcaccccaaaaccccacatccagacgccggctactaagcgacctagacagtgtggactcacagagcagcaccacggacgtgtcaacacccacgtgcacaacccgctcctgtgttcaagtacaagtaacaacaaaagaaggaaagtgtgtagtggtaacactacgcctataatacacttaaaaggtgacaaaaacagtttgaaatgtttaagatataggctacgcaaatatgcagaccattactcagaaatatcctccacctggcattggacaggttgtaataaaaacactggtatattaactgtaacatataatagtgaggtacaaagaaatacctttttggatgtagttactattcctaacagtgtacaaatctcggtgggatacatgactatatgaatctgtatattgtatacagtatgtaacattactatgctatctttagtgtttttattgtgcttttctgtgtgcctttatgtgtgctgcaatgtcccgcttgtgcagtctgtctatgtgtgtgcttttgcttggttgttggtgtttctttttatagttgttattacatccccattaacagcatttgctgtatacatttgttgctatttactacctatgtttgtattacatatgcatgctttacacaccatacaataattactataatgtacagtacagtgtaacatacctgtgatgtgcatgttgttgtatttttgtatttttgtatttttgtatttttgtattttatatgtttaataaaccatggtatcccaccgtgcagcacgtcgcaagcgggcctctgcaactgacttatatagaacatgtaagcaatccggtacgtgcccccctgatgttattaacaaagtggaaggcacaaccttagctgataaaattttacagtggtctagccttgggatatttttgggtggccttggcattggtaccggcagtggttctggaggccgtacgggctatgtacccttagggggcaggtctaatactgttgtggatgttggccccactaggccacctgtggttattgaacctgtagggcctactgatccatctattgttacgttggtagaggattccagtgttgttgcctctggtgctccggttcccacatttaccggaacctctgggtttgaaattacgtcttctggtactaccacaccagctgtgttggacatcacacctaccgtggactctgtttctatttcgtcaactagttttacaaatcctgcattttctgatccctctattattgaggtgccccaaacaggggaggtatcaggtaatatatttgttggtacaccaacatcgggcagccatggatatgaggaaatacctttacaaacatttgcatcttctgggtcaggtacggaacccattagtagtacccccctccctactgtgcggcgggtacggggtccccgcctgtatagtagggctaatcaacaggtccgtgtgtccacctcacagtttttaacacatccctcatcgttggttacatttgataatccagcttatgagcccctggacaccacactatcctttgagcctaccagtaatgttcctgattccgattttatggatattattcgtttgcataggccagcattatcctctagacgtggcactgttagatttagtagattgggtcaaagggcaaccatgtttacacgtagtggtaaacaaatagggggtagggtacatttttaccatgatataagccccattgctgctacagaggaaattgaattgcagcctttaattagtgctacaaatgatagtgacctgtttgatgtatatgcagacttcccacctcctgcgtccactacacctagcactatacacaaatcatttacatatccaaagtattccttgaccatgccttctactgctgcatcctcttacagtaatgttacagtaccattaacatctgcatgggatgtacctatatatactggcccggacattatattgccatcccatactcctatgtggcctagtacatctcctaccaatgcttccaccaccacctatataggtattcatggcacacaatattatttatggccatggtattattattttcctaaaaaacgtaaacgtattccctatttttttgcagatggctttgtggcggcctagtgacagtacggtatatcttccaccaccttctgtggccagagttgtcagcactgatgattatgtgtctcgcacaagcatattttatcatgcaggcagttcccgattattaactgtaggcaatccatattttagggttgtacctaatggtgcaggtaataaacaggctgttcctaaggtatccgcatatcagtatagggtgtttagagtagctttacccgatcctaataaatttggattacctgattctactatatataatcctgaaacacaacgtttggtttgggcatgtgtaggtatggaaattggtcgtgggcagcctttaggtattggcctaagtggccatccattttataataaattggatgatacagaaagtgctcatgcagctacagctgttattacgcaggatgttagggataatgtgtcagttgattataagcaaacacagctgtgtattttaggttgtgtacctgctattggtgagcactgggccaagggcacactttgtaaacctgcacaattgcaacctggtgactgtcctcctttggaacttaaaaacaccattattgaggatggtgatatggtggatacaggttatggggcaatggattttagtacattgcaggatacaaagtgcgaggttccattagacatttgtcaatccatctgtaaatatccagattatttgcaaatgtctgctgatccctatggggattctatgtttttttgcctacgccgtgaacaactgtttgcaagacatttttggaatagggcaggtgttatgggtgacacagtacctacggacctatatattaaaggcactagcgctaatatgcgtgaaacccctggcagttgtgtgtattccccttctcccagtggctctattattacttctgattctcaattatttaataagccatattggttacataaggcccagggccataacaatggtatttgttggcataatcagttgtttgttactgtagtggacactacccgcagtactaatttaacattatgtgcctctacacaaaatcctgtgccaagtacatatgaccctactaagtttaagcagtatagtagacatgtggaggaatatgatttacagtttatttttcagttgtgcactattactttaactgcagaggttatgtcatatatccatagtatgaatagtagtatattagaaaattggaattttggtgtccctccaccacctactacaagtttggtggatacatatcgttttgtgcaatcagttgctgttacctgtcaaaaggatactacacctccagaaaagcaggatccatatgataaattaaagttttggactgttgacctaaaggaaaaattttcctccgatttggatcaatatccccttggtcgaaagtttttagttcaggctgggttacgtcgtaggcctaccataggacctcgtaagcgtcctgctgcttccacgtctactgcatctactgcatctaggcctgccaaacgtgtacgtatacgtagtaagaaataatatgttagcacatatatgtatgtttgtatgtatggttttgtatgttgtatgtatgtatgtatttgtgtgatatattactgtattttgtttgtttgcgtgcgtgtatgtatgaatgtgccttgtggcatgtatggtgttactgtacataattgtggtattaaataaagtatgctaatagtgttgtgtagggttgcacccttgtgagtaacaatactatttgtgtgtatgtgtattgctttgtaccctatattctttcctgtatttcaagttataaacttgcatactacacagcatccattttacttataatcctccattttgctgtgcaaccgatttcggttgcctgtggcttatatgtgaccttttaaacataatacctaaactggcacatttacaacccctacatagtttaacctactggcgcgccttcttggcgtacatgtggcacacctggtattagtcattttcctgtccaggtgtactaaaacaatggcttgcacaactgtatccacaccctatgtaataaaactgcttttaggcacatattttagtctgtttttacctgtgctaattgtataattggcgtgtagaaccactttcttatccaacaatctgtctacttgttacataaactataaactgactcacttatacatacatagtttatgcaaccgaaaaaggttgggccctataacacataccttttctt

SEQ ID NO: 650 - DNA, 7858 bp, Papilloma virus
aatauttttaauaattatautauataaaaaagggtgtaauugaaaauggttguaauuaaaaauggtguatataaaagutttgtggaaaagtguattauaggatggugugutttgaugatuuaaaguaaugauuutauaagutauuagatttgtguauagaattgaatauatuautauaagaugtatutattguutgtgtatattguaaaguaauattggaauguauagaggtatatuaatttguttttaaagatttatgtatagtgtatagagautgtataguatatgutguatguuataaatgtatagauttttattuuagaattagagaattaagatattattuaaaututgtatatggagagauautggaaaaaataautaatauagagttgtataatttgttaataaggtguutguggtguuagaaauuattgaauuuaguagaaaaaugtagauauuttaaggauaaaugaagatttuauaguatagutggauagtauugaggguagtgtaatauatgttgtgauuagguaugguaagaaagauttuguagaugtagggaaauauaagtataguaataagtatguatggauuuugggaaauautguaagaaattgtattguatttggaauutuagaatgaattagatuutgttgauutgttgtgttaugaguaattaagugagtuagaggaggaaaaugatgaaguagatggagttagtuatguauaautauuaguuugaugaguugaauuauagugtuauaaaattttgtgtgtatgttgtaagtgtgaugguagaattgaguttauagtagagagutugguagaggauuttagaauautauaguagutgtttttgaguauuttgtuutttgtgtgtuugtggtgtguaautaauuaataatutauaatgguggatuuagaaggtauugauggggagggaauggggtgtaatggutggttutttgtagaaauaattgtagagaaaaaaauaggggatgtaatatuagatgatgaggatgaaautguaauagatauagggtuggatatggtagattttattgauauauaattatuuatttgtgaauagguagaguaagagauaguauagguattgttuuatguguaggaagttuagaatgatguauaggtgttguatuttttaaaaugaaagtttguaggagguaguaaggaaaauagtuuattaggggaguagutaagtgtggatauggatutaagtuuauggttauaagaaatttuattaaatagtggguauaaaaaaguaaaaugauggttgtttauaatatuagatagtggutatggutgttutgaagtggaagutguagagautuaggtaautgtaaauautaatguggaaaatggugguagtgtauatagtauauaaagtagtggtggggatagtagtgauaatguagaaaatgtagatuuguattguagtattauagaautaaaggagutattauaaguaagtaauaaaaaggutguaatgutgguagtatttaaagauatatatgggutgtuatttauggatttggttagaaattttaaaagtgataaaauaauatgtauagattgggtaatggutatatttggagttaatuuaauggtaguagaaggutttaaaauattaattaaauuaguaaugttatauguuuatatuuaatgtttagattgtaaatggggagtattaatattagutttattaagatataaatgtgguaaaaatagautaautgttguaaaagguttaaguauattgttguaugtauutgaaauatgtatgttaattgaauuauuaaaattgugaagtagtgttguaguattatautggtatagaauaggtatatuuaatattagtgaagtaagtggagauauauutgagtggatauaaagautgauaattattuaauatggtattgaugatagtaattttgatttgtuagauatggtguaatggguatttgataatgauuttauagatgaaagtgatatgguatttuaatatguuuaattaguagautguaauagtaatguagutguatttttaaaaagtaautguuaaguuaaatatttaaaagattgtgutgtaatgtgtagauattataaaagaguauaaaaauguuaaatgaatatgtutuaatggattaaatatagatgttuuaaaatagatgaaggtggggattggagauuuatagtauaattuutaagatatuagggagtagaatttattagutttttaaggguautaaaggaatttuttaaaggaauauuaaaaaaaaattgtatautgttatatggauutguaaatauaggaaaatugtattttggaatgagttttatauatttuutauaaggtguaataatatuatttgtaaattuaaauaguuatttttggttagaauugttaguagatautaaggtaguuatgttggatgatguuauauauaugtgttggauatattttgataattatatgagaaatguattagatggtaatuutataagtatagauagaaaguataaauuattattauagutaaaatgtuutuuaatuutattaauatuuaatattgatuuaguaaaagataataaatgguuatatttagaaagtagggtgauggtatttauatttuuauatguatttuuatttgataaaaatggtaatuuagtatatgaaataaatgataaaaattggaaatgtttttttgaaaggauatggtuuagattagatttguaugaggaugatgaagatguagauauugaaggaatuuutttuggaaugtttaagtgugttauaggauaaaatautagauuautatgaaaatgauagtaaagauataaauaguuaaataagttattgguaauttataugtttggaaaatguaatautatttauaguaagggaauatggtattauuaaautaaauuauuaggtggtguutuutattaauatttuaaaaaguaaaguauataaagutattgaautguaaatgguuttaaaggguuttguauaaaguaagtataauaatgaggaatggauautguaagatauatgugaggaautatggaatauagaauugtuguagtgttttaaaaaagguggtaaaauugtguaugtatautttgatgguaauaaggauaautgtatgaautatgtagtatgggauagtatatattatataautgagauagggatatgggauaaaauaguaguatgtgttagutattggggtgtatattatataaaagatggagatauuauatattatgtauaatttaaaagugaatgtgagaaatatggaaatagtaataugtgggaagtauaatatggggguaatgtaattgattgtaatgaututatgtguagtauuagtgaugauauggtatuugutautuagattgttagauagutauaauauguutuuaugtugauuuuuaaaauuguatuugtggguauuuuaaaauuuuauatuuagauguuggutautaagugauutagauagtgtggautuauagaguaguauuauggaugtgtuaauauuuaugtguauaauuugutuutgtgttuaagtauaagtaauaauaaaagaaggaaagtgtgtagtggtaauautauguutataatauauttaaaaggtgauaaaaauagtttgaaatgtttaagatataggutauguaaatatguagauuattautuagaaatatuutuuauutgguattggauaggttgtaataaaaauautggtatattaautgtaauatataatagtgaggtauaaagaaatauutttttggatgtagttautattuutaauagtgtauaaatutuggtgggatauatgautatatgaatutgtatattgtatauagtatgtaauattautatgutatutttagtgtttttattgtguttttutgtgtguutttatgtgtgutguaatgtuuuguttgtguagtutgtutatgtgtgtguttttguttggttgttggtgtttutttttatagttgttattauatuuuuattaauaguatttgutgtatauatttgttgutatttautauutatgtttgtattauatatguatgutttauauauuatauaataattautataatgtauagtauagtgtaauatauutgtgatgtguatgttgttgtatttttgtatttttgtatttttgtatttttgtattttatatgtttaataaauuatggtatuuuauugtguaguaugtuguaaguggguututguaautgauttatatagaauatgtaaguaatuuggtaugtguuuuuutgatgttattaauaaagtggaagguauaauuttagutgataaaattttauagtggtutaguuttgggatatttttgggtgguuttgguattggtauugguagtggttutggagguugtaugggutatgtauuuttaggggguaggtutaatautgttgtggatgttgguuuuautagguuauutgtggttattgaauutgtaggguutautgatuuatutattgttaugttggtagaggattuuagtgttgttguututggtgutuuggttuuuauatttauuggaauututgggtttgaaattaugtuttutggtautauuauauuagutgtgttggauatuauauutauugtggaututgtttutatttugtuaautagttttauaaatuutguattttutgatuuututattattgaggtguuuuaaauaggggaggtatuaggtaatatatttgttggtauauuaauatuggguaguuatggatatgaggaaatauutttauaaauatttguatuttutgggtuaggtauggaauuuattagtagtauuuuuutuuutautgtguggugggtauggggtuuuuguutgtatagtagggutaatuaauaggtuugtgtgtuuauutuauagtttttaauauatuuutuatugttggttauatttgataatuuaguttatgaguuuutggauauuauautatuutttgaguutauuagtaatgttuutgattuugattttatggatattattugtttguatagguuaguattatuututagaugtgguautgttagatttagtagattgggtuaaaggguaauuatgtttauaugtagtggtaaauaaatagggggtagggtauatttttauuatgatataaguuuuattgutgutauagaggaaattgaattguaguutttaattagtgutauaaatgatagtgauutgtttgatgtatatguagauttuuuauutuutgugtuuautauauutaguautatauauaaatuatttauatatuuaaagtattuuttgauuatguuttutautgutguatuututtauagtaatgttauagtauuattaauatutguatgggatgtauutatatatautgguuuggauattatattguuatuuuatautuutatgtgguutagtauatutuutauuaatguttuuauuauuauutatataggtattuatgguauauaatattatttatgguuatggtattattattttuutaaaaaaugtaaaugtattuuutatttttttguagatggutttgtggugguutagtgauagtauggtatatuttuuauuauuttutgtgguuagagttgtuaguautgatgattatgtgtutuguauaaguatattttatuatguagguagttuuugattattaautgtagguaatuuatattttagggttgtauutaatggtguaggtaataaauaggutgttuutaaggtatuuguatatuagtatagggtgtttagagtagutttauuugatuutaataaatttggattauutgattutautatatataatuutgaaauauaaugtttggtttggguatgtgtaggtatggaaattggtugtggguaguutttaggtattgguutaagtgguuatuuattttataataaattggatgatauagaaagtgutuatguagutauagutgttattauguaggatgttagggataatgtgtuagttgattataaguaaauauagutgtgtattttaggttgtgtauutgutattggtgaguautggguuaaggguauautttgtaaauutguauaattguaauutggtgautgtuutuutttggaauttaaaaauauuattattgaggatggtgatatggtggatauaggttatgggguaatggattttagtauattguaggatauaaagtgugaggttuuattagauatttgtuaatuuatutgtaaatatuuagattatttguaaatgtutgutgatuuutatggggattutatgtttttttguutauguugtgaauaautgtttguaagauatttttggaataggguaggtgttatgggtgauauagtauutauggauutatatattaaagguautagugutaatatgugtgaaauuuutgguagttgtgtgtattuuuuttutuuuagtggututattattauttutgattutuaattatttaataaguuatattggttauataagguuuaggguuataauaatggtatttgttgguataatuagttgtttgttautgtagtggauautauuuguagtautaatttaauattatgtguututauauaaaatuutgtguuaagtauatatgauuutautaagtttaaguagtatagtagauatgtggaggaatatgatttauagtttatttttuagttgtguautattautttaautguagaggttatgtuatatatuuatagtatgaatagtagtatattagaaaattggaattttggtgtuuutuuauuauutautauaagtttggtggatauatatugttttgtguaatuagttgutgttauutgtuaaaaggatautauauutuuagaaaaguaggatuuatatgataaattaaagttttggautgttgauutaaaggaaaaattttuutuugatttggatuaatatuuuuttggtugaaagtttttagttuaggutgggttaugtugtagguutauuataggauutugtaagugtuutgutguttuuaugtutautguatutautguatutagguutguuaaaugtgtaugtataugtagtaagaaataatatgttaguauatatatgtatgtttgtatgtatggttttgtatgttgtatgtatgtatgtatttgtgtgatatattautgtattttgtttgtttgugtgugtgtatgtatgaatgtguuttgtgguatgtatggtgttautgtauataattgtggtattaaataaagtatgutaatagtgttgtgtagggttguauuuttgtgagtaauaatautatttgtgtgtatgtgtattgutttgtauuutatattutttuutgtatttuaagttataaauttguatautauauaguatuuattttauttataatuutuuattttgutgtguaauugatttuggttguutgtgguttatatgtgauuttttaaauataatauutaaautgguauatttauaauuuutauatagtttaauutautgguguguuttuttggugtauatgtgguauauutggtattagtuattttuutgtuuaggtgtautaaaauaatgguttguauaautgtatuuauauuutatgtaataaaautguttttagguauatattttagtutgtttttauutgtgutaattgtataattggugtgtagaauuautttuttatuuaauaatutgtutauttgttauataaautataaautgautuauttatauatauatagtttatguaauugaaaaaggttggguuutataauauatauuttttutt

SEQ ID NO: 651 - DNA, 7858 bp, Papilloma virus
aatatttttaataattatattatataaaaaagggtgtaattgaaaatggttgtaattaaaaatggtgtatataaaagttttgtggaaaagtgtattataggatggtgtgttttgatgatttaaagtaatgattttataagttattagatttgtgtatagaattgaatatattattataagatgtatttattgtttgtgtatattgtaaagtaatattggaatgtatagaggtatattaatttgtttttaaagatttatgtatagtgtatagagattgtatagtatatgttgtatgttataaatgtatagatttttattttagaattagagaattaagatattatttaaattttgtatatggagagatattggaaaaaataattaatatagagttgtataatttgttaataaggtgtttgtggtgttagaaattattgaatttagtagaaaaatgtagatattttaaggataaatgaagattttatagtatagttggatagtattgagggtagtgtaatatatgttgtgattaggtatggtaagaaagattttgtagatgtagggaaatataagtatagtaataagtatgtatggattttgggaaatattgtaagaaattgtattgtatttggaattttagaatgaattagattttgttgatttgttgtgttatgagtaattaagtgagttagaggaggaaaatgatgaagtagatggagttagttatgtataattattagtttgatgagttgaattatagtgttataaaattttgtgtgtatgttgtaagtgtgatggtagaattgagtttatagtagagagtttggtagaggattttagaatattatagtagttgtttttgagtattttgttttttgtgtgtttgtggtgtgtaattaattaataatttataatggtggatttagaaggtattgatggggagggaatggggtgtaatggttggttttttgtagaaataattgtagagaaaaaaataggggatgtaatattagatgatgaggatgaaattgtaatagatatagggttggatatggtagattttattgatatataattatttatttgtgaataggtagagtaagagatagtataggtattgttttatgtgtaggaagtttagaatgatgtataggtgttgtattttttaaaatgaaagtttgtaggaggtagtaaggaaaatagtttattaggggagtagttaagtgtggatatggatttaagtttatggttataagaaattttattaaatagtgggtataaaaaagtaaaatgatggttgtttataatattagatagtggttatggttgttttgaagtggaagttgtagagatttaggtaattgtaaatattaatgtggaaaatggtggtagtgtatatagtatataaagtagtggtggggatagtagtgataatgtagaaaatgtagatttgtattgtagtattatagaattaaaggagttattataagtaagtaataaaaaggttgtaatgttggtagtatttaaagatatatatgggttgttatttatggatttggttagaaattttaaaagtgataaaataatatgtatagattgggtaatggttatatttggagttaatttaatggtagtagaaggttttaaaatattaattaaattagtaatgttatatgtttatatttaatgtttagattgtaaatggggagtattaatattagttttattaagatataaatgtggtaaaaatagattaattgttgtaaaaggtttaagtatattgttgtatgtatttgaaatatgtatgttaattgaattattaaaattgtgaagtagtgttgtagtattatattggtatagaataggtatatttaatattagtgaagtaagtggagatatatttgagtggatataaagattgataattatttaatatggtattgatgatagtaattttgatttgttagatatggtgtaatgggtatttgataatgattttatagatgaaagtgatatggtattttaatatgtttaattagtagattgtaatagtaatgtagttgtatttttaaaaagtaattgttaagttaaatatttaaaagattgtgttgtaatgtgtagatattataaaagagtataaaaatgttaaatgaatatgttttaatggattaaatatagatgttttaaaatagatgaaggtggggattggagatttatagtataatttttaagatattagggagtagaatttattagttttttaagggtattaaaggaattttttaaaggaatattaaaaaaaaattgtatattgttatatggatttgtaaatataggaaaattgtattttggaatgagttttatatattttttataaggtgtaataatattatttgtaaatttaaatagttatttttggttagaattgttagtagatattaaggtagttatgttggatgatgttatatatatgtgttggatatattttgataattatatgagaaatgtattagatggtaattttataagtatagatagaaagtataaattattattatagttaaaatgttttttaattttattaatatttaatattgatttagtaaaagataataaatggttatatttagaaagtagggtgatggtatttatatttttatatgtatttttatttgataaaaatggtaatttagtatatgaaataaatgataaaaattggaaatgtttttttgaaaggatatggtttagattagatttgtatgaggatgatgaagatgtagatattgaaggaattttttttggaatgtttaagtgtgttataggataaaatattagattattatgaaaatgatagtaaagatataaatagttaaataagttattggtaatttatatgtttggaaaatgtaatattatttatagtaagggaatatggtattattaaattaaattattaggtggtgttttttattaatattttaaaaagtaaagtatataaagttattgaattgtaaatggttttaaagggttttgtataaagtaagtataataatgaggaatggatattgtaagatatatgtgaggaattatggaatatagaattgttgtagtgttttaaaaaaggtggtaaaattgtgtatgtatattttgatggtaataaggataattgtatgaattatgtagtatgggatagtatatattatataattgagatagggatatgggataaaatagtagtatgtgttagttattggggtgtatattatataaaagatggagatattatatattatgtataatttaaaagtgaatgtgagaaatatggaaatagtaatatgtgggaagtataatatgggggtaatgtaattgattgtaatgattttatgtgtagtattagtgatgatatggtatttgttatttagattgttagatagttataatatgtttttatgttgatttttaaaattgtatttgtgggtattttaaaattttatatttagatgttggttattaagtgatttagatagtgtggatttatagagtagtattatggatgtgttaatatttatgtgtataatttgtttttgtgtttaagtataagtaataataaaagaaggaaagtgtgtagtggtaatattatgtttataatatatttaaaaggtgataaaaatagtttgaaatgtttaagatataggttatgtaaatatgtagattattatttagaaatattttttatttggtattggataggttgtaataaaaatattggtatattaattgtaatatataatagtgaggtataaagaaatatttttttggatgtagttattatttttaatagtgtataaattttggtgggatatatgattatatgaatttgtatattgtatatagtatgtaatattattatgttatttttagtgtttttattgtgtttttttgtgtgtttttatgtgtgttgtaatgttttgtttgtgtagtttgtttatgtgtgtgtttttgtttggttgttggtgtttttttttatagttgttattatatttttattaatagtatttgttgtatatatttgttgttatttattatttatgtttgtattatatatgtatgttttatatattatataataattattataatgtatagtatagtgtaatatatttgtgatgtgtatgttgttgtatttttgtatttttgtatttttgtatttttgtattttatatgtttaataaattatggtattttattgtgtagtatgttgtaagtgggtttttgtaattgatttatatagaatatgtaagtaatttggtatgtgtttttttgatgttattaataaagtggaaggtataattttagttgataaaattttatagtggtttagttttgggatatttttgggtggttttggtattggtattggtagtggttttggaggttgtatgggttatgtatttttagggggtaggtttaatattgttgtggatgttggttttattaggttatttgtggttattgaatttgtagggtttattgatttatttattgttatgttggtagaggattttagtgttgttgtttttggtgttttggtttttatatttattggaatttttgggtttgaaattatgttttttggtattattatattagttgtgttggatattatatttattgtggattttgtttttattttgttaattagttttataaattttgtattttttgatttttttattattgaggtgttttaaataggggaggtattaggtaatatatttgttggtatattaatattgggtagttatggatatgaggaaatatttttataaatatttgtattttttgggttaggtatggaatttattagtagtatttttttttttattgtgtggtgggtatggggtttttgtttgtatagtagggttaattaataggtttgtgtgtttattttatagtttttaatatattttttattgttggttatatttgataatttagtttatgagtttttggatattatattattttttgagtttattagtaatgtttttgattttgattttatggatattatttgtttgtataggttagtattattttttagatgtggtattgttagatttagtagattgggttaaagggtaattatgtttatatgtagtggtaaataaatagggggtagggtatatttttattatgatataagttttattgttgttatagaggaaattgaattgtagtttttaattagtgttataaatgatagtgatttgtttgatgtatatgtagattttttattttttgtgtttattatatttagtattatatataaattatttatatatttaaagtattttttgattatgttttttattgttgtatttttttatagtaatgttatagtattattaatatttgtatgggatgtatttatatatattggtttggatattatattgttattttatatttttatgtggtttagtatattttttattaatgtttttattattatttatataggtatttatggtatataatattatttatggttatggtattattatttttttaaaaaatgtaaatgtattttttatttttttgtagatggttttgtggtggtttagtgatagtatggtatattttttattattttttgtggttagagttgttagtattgatgattatgtgttttgtataagtatattttattatgtaggtagtttttgattattaattgtaggtaatttatattttagggttgtatttaatggtgtaggtaataaataggttgtttttaaggtatttgtatattagtatagggtgtttagagtagttttatttgattttaataaatttggattatttgattttattatatataattttgaaatataatgtttggtttgggtatgtgtaggtatggaaattggttgtgggtagtttttaggtattggtttaagtggttatttattttataataaattggatgatatagaaagtgtttatgtagttatagttgttattatgtaggatgttagggataatgtgttagttgattataagtaaatatagttgtgtattttaggttgtgtatttgttattggtgagtattgggttaagggtatattttgtaaatttgtataattgtaatttggtgattgtttttttttggaatttaaaaatattattattgaggatggtgatatggtggatataggttatggggtaatggattttagtatattgtaggatataaagtgtgaggttttattagatatttgttaatttatttgtaaatatttagattatttgtaaatgtttgttgatttttatggggattttatgtttttttgtttatgttgtgaataattgtttgtaagatatttttggaatagggtaggtgttatgggtgatatagtatttatggatttatatattaaaggtattagtgttaatatgtgtgaaatttttggtagttgtgtgtatttttttttttttagtggttttattattatttttgatttttaattatttaataagttatattggttatataaggtttagggttataataatggtatttgttggtataattagttgtttgttattgtagtggatattatttgtagtattaatttaatattatgtgtttttatataaaattttgtgttaagtatatatgattttattaagtttaagtagtatagtagatatgtggaggaatatgatttatagtttattttttagttgtgtattattattttaattgtagaggttatgttatatatttatagtatgaatagtagtatattagaaaattggaattttggtgtttttttattatttattataagtttggtggatatatattgttttgtgtaattagttgttgttatttgttaaaaggatattatatttttagaaaagtaggatttatatgataaattaaagttttggattgttgatttaaaggaaaaatttttttttgatttggattaatatttttttggttgaaagtttttagtttaggttgggttatgttgtaggtttattataggattttgtaagtgttttgttgtttttatgtttattgtatttattgtatttaggtttgttaaatgtgtatgtatatgtagtaagaaataatatgttagtatatatatgtatgtttgtatgtatggttttgtatgttgtatgtatgtatgtatttgtgtgatatattattgtattttgtttgtttgtgtgtgtgtatgtatgaatgtgttttgtggtatgtatggtgttattgtatataattgtggtattaaataaagtatgttaatagtgttgtgtagggttgtatttttgtgagtaataatattatttgtgtgtatgtgtattgttttgtattttatatttttttttgtattttaagttataaatttgtatattatatagtatttattttatttataattttttattttgttgtgtaattgattttggttgtttgtggtttatatgtgattttttaaatataatatttaaattggtatatttataatttttatatagtttaatttattggtgtgtttttttggtgtatatgtggtatatttggtattagttatttttttgtttaggtgtattaaaataatggtttgtataattgtatttatattttatgtaataaaattgtttttaggtatatattttagtttgtttttatttgtgttaattgtataattggtgtgtagaattatttttttatttaataatttgtttatttgttatataaattataaattgatttatttatatatatatagtttatgtaattgaaaaaggttgggttttataatatatattttttttt

SEQ ID NO: 652 - DNA, 7858 bp, Papilloma virus
ttatgaaaattgttaatatgatgtattttttcccacattggcttttgccaacgttggtttttgccacgtatattttcgaaacaccttttcacgtaatgtcctaccgcgcgaaactgctaggtttcgttgctgggatgttcgatggtctaaacacgtgtcttaacttatgtagtgatgttctgcatagataacggacacatataacgtttcgttgtaaccttgcgtgtctccatatagttaaacgaaaatttctaaatacatatcacatatctctgacatatcgtatacgacgtacggtatttacatatctgaaaataaggtcttaatctcttaattctataataagtttgagacatatacctctctgtgaccttttttattgattatgtctcaacatattaaacaattattccacggacgccacggtctttggtaacttgggtcgtctttttgcatctgtggaattcctgtttgcttctaaagtgtcgtatcgacctgtcatggctcccgtcacattatgtacaacactggtccgtgccgttctttctgaagcgtctgcatccctttgtgttcatatcgttattcatacgtacctggggccctttgtgacgttctttaacataacgtaaaccttggagtcttacttaatctaggacaactggacaacacaatgctcgttaattcgctcagtctcctccttttgctacttcgtctacctcaatcagtacgtgttgatggtcgggctgctcggcttggtgtcgcagtgttttaaaacacacatacaacattcacactgccgtcttaactcgaatgtcatctctcgagccgtctcctggaatcttgtgatgtcgtcgacaaaaactcgtggaacaggaaacacacaggcaccacacgttgattggttattagatgttaccgcctaggtcttccatggctgcccctcccttgccccacattaccgaccaagaaacatctttgttaacatctctttttttgtcccctacattatagtctactactcctactttgacgttgtctatgtcccagcctataccatctaaaataactgtgtgttaataggtaaacacttgtccgtctcgttctctgtcgtgtccgtaacaaggtacgcgtccttcaagtcttactacgtgtccacaacgtagaaaattttgctttcaaacgtcctccgtcgttccttttgtcaggtaatcccctcgtcgattcacacctatgcctagattcaggtgccaatgttctttaaagtaatttatcacccgtgttttttcgttttgctgccaacaaatgttatagtctatcaccgataccgacaagacttcaccttcgacgtctctgagtccattgacatttgtgattacgccttttaccgccgtcacatgtatcatgtgtttcatcaccacccctatcatcactgttacgtcttttacatctaggcgtaacgtcataatgtcttgatttcctcgataatgttcgttcattgtttttccgacgttacgaccgtcataaatttctgtatatacccgacagtaaatgcctaaaccaatctttaaaattttcactattttgttgtacatgtctaacccattaccgatataaacctcaattaggttgccatcgtcttccgaaattttgtaattaatttggtcgttgcaatatgcgggtataggttacaaatctaacatttacccctcataattataatcgaaataattctatatttacaccgtttttatctgattgacaacgttttccgaattcgtgtaacaacgtgcatggactttgtacatacaattaacttggtggttttaacgcttcatcacaacgtcgtaatatgaccatatcttgtccatataggttataatcacttcattcacctctgtgtggactcacctatgtttctgactgttaataagttgtaccataactgctatcattaaaactaaacagtctgtaccacgttacccgtaaactattactggaatgtctactttcactataccgtaaagttatacgggttaatcgtctgacgttgtcattacgtcgacgtaaaaatttttcattgacggttcggtttataaattttctaacacgacattacacatctgtaatattttctcgtgtttttgcggtttacttatacagagttacctaatttatatctacaaggttttatctacttccacccctaacctctgggtatcatgttaaggattctatagtccctcatcttaaataatcgaaaaattcccgtgatttccttaaagaatttccttgtggtttttttttaacatatgacaatatacctggacgtttatgtccttttagcataaaaccttactcaaaatatgtaaaggatgttccacgttattatagtaaacatttaagtttgtcggtaaaaaccaatcttggcaatcgtctatgattccatcggtacaacctactacggtgtgtgtgcacaacctgtataaaactattaatatactctttacgtaatctaccattaggatattcatatctgtctttcgtatttggtaataatgtcgattttacaggaggttaggataattgtaggttataactaggtcgttttctattatttaccggtataaatctttcatcccactgccataaatgtaaaggtgtacgtaaaggtaaactatttttaccattaggtcatatactttatttactatttttaacctttacaaaaaaactttcctgtaccaggtctaatctaaacgtgctcctgctacttctacgtctgtggcttccttagggaaagccttgcaaattcacgcaatgtcctgttttatgatctggtgatacttttactgtcatttctgtatttgtcggtttattcaataaccgttgaatatgcaaaccttttacgttatgataaatgtcgttcccttgtaccataatggtttgatttggtggtccaccacggaggataattgtaaagtttttcgtttcgtgtatttcgataacttgacgtttaccggaatttcccggaacgtgtttcgttcatattgttactccttacctgtgacgttctatgtacgctccttgataccttatgtcttggcagcgtcacaaaattttttccgccattttggcacgtgcatatgaaactaccgttgttcctgttgacatacttgatacatcataccctgtcatatataatatattgactctgtccctataccctgttttgtcgtcgtacacaatcgataaccccacatataatatattttctacctctatggtgtataatacatgttaaattttcgcttacactctttatacctttatcattatgcacccttcatgttatacccccgttacattaactaacattactgagatacacgtcatggtcactgctgtgccataggcgatgagtctaacaatctgtcgatgttgtgcggaggtgcagctgggggttttggcgtaggcacccgtggggttttggggtgtaggtctgcggccgatgattcgctggatctgtcacacctgagtgtctcgtcgtggtgcctgcacagttgtgggtgcacgtgttgggcgaggacacaagttcatgttcattgttgttttcttcctttcacacatcaccattgtgatgcggatattatgtgaattttccactgtttttgtcaaactttacaaattctatatccgatgcgtttatacgtctggtaatgagtctttataggaggtggaccgtaacctgtccaacattatttttgtgaccatataattgacattgtatattatcactccatgtttctttatggaaaaacctacatcaatgataaggattgtcacatgtttagagccaccctatgtactgatatacttagacatataacatatgtcatacattgtaatgatacgatagaaatcacaaaaataacacgaaaagacacacggaaatacacacgacgttacagggcgaacacgtcagacagatacacacacgaaaacgaaccaacaaccacaaagaaaaatatcaacaataatgtaggggtaattgtcgtaaacgacatatgtaaacaacgataaatgatggatacaaacataatgtatacgtacgaaatgtgtggtatgttattaatgatattacatgtcatgtcacattgtatggacactacacgtacaacaacataaaaacataaaaacataaaaacataaaaacataaaatatacaaattatttggtaccatagggtggcacgtcgtgcagcgttcgcccggagacgttgactgaatatatcttgtacattcgttaggccatgcacggggggactacaataattgtttcaccttccgtgttggaatcgactattttaaaatgtcaccagatcggaaccctataaaaacccaccggaaccgtaaccatggccgtcaccaagacctccggcatgcccgatacatgggaatcccccgtccagattatgacaacacctacaaccggggtgatccggtggacaccaataacttggacatcccggatgactaggtagataacaatgcaaccatctcctaaggtcacaacaacggagaccacgaggccaagggtgtaaatggccttggagacccaaactttaatgcagaagaccatgatggtgtggtcgacacaacctgtagtgtggatggcacctgagacaaagataaagcagttgatcaaaatgtttaggacgtaaaagactagggagataataactccacggggtttgtcccctccatagtccattatataaacaaccatgtggttgtagcccgtcggtacctatactcctttatggaaatgtttgtaaacgtagaagacccagtccatgccttgggtaatcatcatggggggagggatgacacgccgcccatgccccaggggcggacatatcatcccgattagttgtccaggcacacaggtggagtgtcaaaaattgtgtagggagtagcaaccaatgtaaactattaggtcgaatactcggggacctgtggtgtgataggaaactcggatggtcattacaaggactaaggctaaaatacctataataagcaaacgtatccggtcgtaataggagatctgcaccgtgacaatctaaatcatctaacccagtttcccgttggtacaaatgtgcatcaccatttgtttatcccccatcccatgtaaaaatggtactatattcggggtaacgacgatgtctcctttaacttaacgtcggaaattaatcacgatgtttactatcactggacaaactacatatacgtctgaagggtggaggacgcaggtgatgtggatcgtgatatgtgtttagtaaatgtataggtttcataaggaactggtacggaagatgacgacgtaggagaatgtcattacaatgtcatggtaattgtagacgtaccctacatggatatatatgaccgggcctgtaatataacggtagggtatgaggatacaccggatcatgtagaggatggttacgaaggtggtggtggatatatccataagtaccgtgtgttataataaataccggtaccataataataaaaggattttttgcatttgcataagggataaaaaaacgtctaccgaaacaccgccggatcactgtcatgccatatagaaggtggtggaagacaccggtctcaacagtcgtgactactaatacacagagcgtgttcgtataaaatagtacgtccgtcaagggctaataattgacatccgttaggtataaaatcccaacatggattaccacgtccattatttgtccgacaaggattccataggcgtatagtcatatcccacaaatctcatcgaaatgggctaggattatttaaacctaatggactaagatgatatatattaggactttgtgttgcaaaccaaacccgtacacatccatacctttaaccagcacccgtcggaaatccataaccggattcaccggtaggtaaaatattatttaacctactatgtctttcacgagtacgtcgatgtcgacaataatgcgtcctacaatccctattacacagtcaactaatattcgtttgtgtcgacacataaaatccaacacatggacgataaccactcgtgacccggttcccgtgtgaaacatttggacgtgttaacgttggaccactgacaggaggaaaccttgaatttttgtggtaataactcctaccactataccacctatgtccaataccccgttacctaaaatcatgtaacgtcctatgtttcacgctccaaggtaatctgtaaacagttaggtagacatttataggtctaataaacgtttacagacgactagggatacccctaagatacaaaaaaacggatgcggcacttgttgacaaacgttctgtaaaaaccttatcccgtccacaatacccactgtgtcatggatgcctggatatataatttccgtgatcgcgattatacgcactttggggaccgtcaacacacataaggggaagagggtcaccgagataataatgaagactaagagttaataaattattcggtataaccaatgtattccgggtcccggtattgttaccataaacaaccgtattagtcaacaaacaatgacatcacctgtgatgggcgtcatgattaaattgtaatacacggagatgtgttttaggacacggttcatgtatactgggatgattcaaattcgtcatatcatctgtacacctccttatactaaatgtcaaataaaaagtcaacacgtgataatgaaattgacgtctccaatacagtatataggtatcatacttatcatcatataatcttttaaccttaaaaccacagggaggtggtggatgatgttcaaaccacctatgtatagcaaaacacgttagtcaacgacaatggacagttttcctatgatgtggaggtcttttcgtcctaggtatactatttaatttcaaaacctgacaactggatttcctttttaaaaggaggctaaacctagttataggggaaccagctttcaaaaatcaagtccgacccaatgcagcatccggatggtatcctggagcattcgcaggacgacgaaggtgcagatgacgtagatgacgtagatccggacggtttgcacatgcatatgcatcattctttattatacaatcgtgtatatacatacaaacatacataccaaaacatacaacatacatacatacataaacacactatataatgacataaaacaaacaaacgcacgcacatacatacttacacggaacaccgtacataccacaatgacatgtattaacaccataatttatttcatacgattatcacaacacatcccaacgtgggaacactcattgttatgataaacacacatacacataacgaaacatgggatataagaaaggacataaagttcaatatttgaacgtatgatgtgtcgtaggtaaaatgaatattaggaggtaaaacgacacgttggctaaagccaacggacaccgaatatacactggaaaatttgtattatggatttgaccgtgtaaatgttggggatgtatcaaattggatgaccgcgcggaagaaccgcatgtacaccgtgtggaccataatcagtaaaaggacaggtccacatgattttgttaccgaacgtgttgacataggtgtgggatacattattttgacgaaaatccgtgtataaaatcagacaaaaatggacacgattaacatattaaccgcacatcttggtgaaagaataggttgttagacagatgaacaatgtatttgatatttgactgagtgaatatgtatgtatcaaatacgttggctttttccaacccgggatattgtgtatggaaaagaa

SEQ ID NO: 653 - DNA, 7858 bp, Papilloma virus
ttatgaaaattgttaatatgatgtattttttuuuauattgguttttguuaaugttggtttttguuaugtatattttugaaauauuttttuaugtaatgtuutauugugugaaautgutaggtttugttgutgggatgttugatggtutaaauaugtgtuttaauttatgtagtgatgttutguatagataauggauauatataaugtttugttgtaauuttgugtgtutuuatatagttaaaugaaaatttutaaatauatatuauatatututgauatatugtataugaugtauggtatttauatatutgaaaataaggtuttaatututtaattutataataagtttgagauatatauutututgtgauuttttttattgattatgtutuaauatattaaauaattattuuauggauguuauggtutttggtaauttgggtugtutttttguatutgtggaattuutgtttguttutaaagtgtugtatugauutgtuatggutuuugtuauattatgtauaauautggtuugtguugttutttutgaagugtutguatuuutttgtgttuatatugttattuataugtauutgggguuutttgtgaugttutttaauataaugtaaauuttggagtuttauttaatutaggauaautggauaauauaatgutugttaattugutuagtutuutuuttttgutauttugtutauutuaatuagtaugtgttgatggtugggutgutugguttggtgtuguagtgttttaaaauauauatauaauattuauautguugtuttaautugaatgtuatututugaguugtutuutggaatuttgtgatgtugtugauaaaaautugtggaauaggaaauauauagguauuauaugttgattggttattagatgttauuguutaggtuttuuatggutguuuutuuuttguuuuauattauugauuaagaaauatutttgttaauatututttttttgtuuuutauattatagtutautautuutautttgaugttgtutatgtuuuaguutatauuatutaaaataautgtgtgttaataggtaaauauttgtuugtutugttututgtugtgtuugtaauaaggtaugugtuuttuaagtuttautaugtgtuuauaaugtagaaaattttgutttuaaaugtuutuugtugttuuttttgtuaggtaatuuuutugtugattuauauutatguutagattuaggtguuaatgttutttaaagtaatttatuauuugtgttttttugttttgutguuaauaaatgttatagtutatuauugatauugauaagauttuauuttugaugtututgagtuuattgauatttgtgattauguuttttauuguugtuauatgtatuatgtgtttuatuauuauuuutatuatuautgttaugtuttttauatutaggugtaaugtuataatgtuttgatttuutugataatgttugttuattgtttttuugaugttaugauugtuataaatttutgtatatauuugauagtaaatguutaaauuaatutttaaaattttuautattttgttgtauatgtutaauuuattauugatataaauutuaattaggttguuatugtuttuugaaattttgtaattaatttggtugttguaatatgugggtataggttauaaatutaauatttauuuutuataattataatugaaataattutatatttauauugtttttatutgattgauaaugttttuugaattugtgtaauaaugtguatggautttgtauatauaattaauttggtggttttaauguttuatuauaaugtugtaatatgauuatatuttgtuuatataggttataatuauttuattuauututgtgtggautuauutatgtttutgautgttaataagttgtauuataautgutatuattaaaautaaauagtutgtauuaugttauuugtaaautattautggaatgtutautttuautatauugtaaagttataugggttaatugtutgaugttgtuattaugtugaugtaaaaatttttuattgauggttuggtttataaattttutaauaugauattauauatutgtaatattttutugtgtttttguggtttauttatauagagttauutaatttatatutauaaggttttatutauttuuauuuutaauututgggtatuatgttaaggattutatagtuuutuatuttaaataatugaaaaattuuugtgatttuuttaaagaatttuuttgtggtttttttttaauatatgauaatatauutggaugtttatgtuuttttaguataaaauuttautuaaaatatgtaaaggatgttuuaugttattatagtaaauatttaagtttgtuggtaaaaauuaatuttgguaatugtutatgattuuatuggtauaauutautauggtgtgtgtguauaauutgtataaaautattaatataututttaugtaatutauuattaggatattuatatutgtutttugtatttggtaataatgtugattttauaggaggttaggataattgtaggttataautaggtugttttutattatttauuggtataaatutttuatuuuautguuataaatgtaaaggtgtaugtaaaggtaaautatttttauuattaggtuatatautttatttautatttttaauutttauaaaaaaautttuutgtauuaggtutaatutaaaugtgutuutgutauttutaugtutgtgguttuuttagggaaaguuttguaaattuauguaatgtuutgttttatgatutggtgatauttttautgtuatttutgtatttgtuggtttattuaataauugttgaatatguaaauuttttaugttatgataaatgtugttuuuttgtauuataatggtttgatttggtggtuuauuauggaggataattgtaaagtttttugtttugtgtatttugataauttgaugtttauuggaatttuuuggaaugtgtttugttuatattgttautuuttauutgtgaugttutatgtaugutuuttgatauuttatgtuttgguagugtuauaaaattttttuuguuattttgguaugtguatatgaaautauugttgttuutgttgauatauttgatauatuatauuutgtuatatataatatattgaututgtuuutatauuutgttttgtugtugtauauaatugataauuuuauatataatatattttutauututatggtgtataatauatgttaaattttuguttauaututttatauutttatuattatguauuuttuatgttatauuuuugttauattaautaauattautgagatauaugtuatggtuautgutgtguuataggugatgagtutaauaatutgtugatgttgtguggaggtguagutgggggttttggugtagguauuugtggggttttggggtgtaggtutgugguugatgattugutggatutgtuauauutgagtgtutugtugtggtguutguauagttgtgggtguaugtgttgggugaggauauaagttuatgttuattgttgttttuttuutttuauauatuauuattgtgatguggatattatgtgaattttuuautgtttttgtuaaautttauaaattutatatuugatgugtttataugtutggtaatgagtutttataggaggtggauugtaauutgtuuaauattatttttgtgauuatataattgauattgtatattatuautuuatgtttutttatggaaaaauutauatuaatgataaggattgtuauatgtttagaguuauuutatgtautgatatauttagauatataauatatgtuatauattgtaatgataugatagaaatuauaaaaataauaugaaaagauauauggaaatauauaugaugttauagggugaauaugtuagauagatauauauaugaaaaugaauuaauaauuauaaagaaaaatatuaauaataatgtaggggtaattgtugtaaaugauatatgtaaauaaugataaatgatggatauaaauataatgtataugtaugaaatgtgtggtatgttattaatgatattauatgtuatgtuauattgtatggauautauaugtauaauaauataaaaauataaaaauataaaaauataaaaauataaaatatauaaattatttggtauuatagggtgguaugtugtguagugttuguuuggagaugttgautgaatatatuttgtauattugttagguuatguauggggggautauaataattgtttuauuttuugtgttggaatugautattttaaaatgtuauuagatuggaauuutataaaaauuuauuggaauugtaauuatgguugtuauuaagauutuugguatguuugatauatgggaatuuuuugtuuagattatgauaauauutauaauuggggtgatuuggtggauauuaataauttggauatuuuggatgautaggtagataauaatguaauuatutuutaaggtuauaauaauggagauuaugagguuaagggtgtaaatgguuttggagauuuaaautttaatguagaagauuatgatggtgtggtugauauaauutgtagtgtggatgguauutgagauaaagataaaguagttgatuaaaatgtttaggaugtaaaagautagggagataataautuuauggggtttgtuuuutuuatagtuuattatataaauaauuatgtggttgtaguuugtuggtauutatautuutttatggaaatgtttgtaaaugtagaagauuuagtuuatguuttgggtaatuatuatggggggagggatgauauguuguuuatguuuuagggguggauatatuatuuugattagttgtuuagguauauaggtggagtgtuaaaaattgtgtagggagtaguaauuaatgtaaautattaggtugaatautuggggauutgtggtgtgataggaaautuggatggtuattauaaggautaaggutaaaatauutataataaguaaaugtatuuggtugtaataggagatutguauugtgauaatutaaatuatutaauuuagtttuuugttggtauaaatgtguatuauuatttgtttatuuuuuatuuuatgtaaaaatggtautatattuggggtaaugaugatgtutuutttaauttaaugtuggaaattaatuaugatgtttautatuautggauaaautauatataugtutgaagggtggaggauguaggtgatgtggatugtgatatgtgtttagtaaatgtataggtttuataaggaautggtauggaagatgaugaugtaggagaatgtuattauaatgtuatggtaattgtagaugtauuutauatggatatatatgauuggguutgtaatataauggtagggtatgaggatauauuggatuatgtagaggatggttaugaaggtggtggtggatatatuuataagtauugtgtgttataataaatauuggtauuataataataaaaggattttttguatttguataagggataaaaaaaugtutauugaaauauuguuggatuautgtuatguuatatagaaggtggtggaagauauuggtutuaauagtugtgautautaatauauagagugtgttugtataaaatagtaugtuugtuaagggutaataattgauatuugttaggtataaaatuuuaauatggattauuaugtuuattatttgtuugauaaggattuuataggugtatagtuatatuuuauaaatutuatugaaatgggutaggattatttaaauutaatggautaagatgatatatattaggautttgtgttguaaauuaaauuugtauauatuuatauutttaauuaguauuugtuggaaatuuataauuggattuauuggtaggtaaaatattatttaauutautatgtutttuaugagtaugtugatgtugauaataatgugtuutauaatuuutattauauagtuaautaatattugtttgtgtugauauataaaatuuaauauatggaugataauuautugtgauuuggttuuugtgtgaaauatttggaugtgttaaugttggauuautgauaggaggaaauuttgaatttttgtggtaataautuutauuautatauuauutatgtuuaatauuuugttauutaaaatuatgtaaugtuutatgtttuaugutuuaaggtaatutgtaaauagttaggtagauatttataggtutaataaaugtttauagaugautagggatauuuutaagatauaaaaaaauggatgugguauttgttgauaaaugttutgtaaaaauuttatuuugtuuauaatauuuautgtgtuatggatguutggatatataatttuugtgatugugattatauguautttggggauugtuaauauauataaggggaagagggtuauugagataataatgaagautaagagttaataaattattuggtataauuaatgtattuugggtuuuggtattgttauuataaauaauugtattagtuaauaaauaatgauatuauutgtgatgggugtuatgattaaattgtaatauauggagatgtgttttaggauauggttuatgtatautgggatgattuaaattugtuatatuatutgtauauutuuttatautaaatgtuaaataaaaagtuaauaugtgataatgaaattgaugtutuuaatauagtatataggtatuatauttatuatuatataatuttttaauuttaaaauuauagggaggtggtggatgatgttuaaauuauutatgtataguaaaauaugttagtuaaugauaatggauagttttuutatgatgtggaggtuttttugtuutaggtatautatttaatttuaaaauutgauaautggatttuutttttaaaaggaggutaaauutagttataggggaauuagutttuaaaaatuaagtuugauuuaatguaguatuuggatggtatuutggaguattuguaggaugaugaaggtguagatgaugtagatgaugtagatuuggauggtttguauatguatatguatuattutttattatauaatugtgtatatauatauaaauatauatauuaaaauatauaauatauatauatauataaauauautatataatgauataaaauaaauaaauguauguauatauatauttauauggaauauugtauatauuauaatgauatgtattaauauuataatttatttuataugattatuauaauauatuuuaaugtgggaauautuattgttatgataaauauauatauauataaugaaauatgggatataagaaaggauataaagttuaatatttgaaugtatgatgtgtugtaggtaaaatgaatattaggaggtaaaaugauaugttggutaaaguuaauggauauugaatatauautggaaaatttgtattatggatttgauugtgtaaatgttggggatgtatuaaattggatgauuguguggaagaauuguatgtauauugtgtggauuataatuagtaaaaggauaggtuuauatgattttgttauugaaugtgttgauataggtgtgggatauattattttgaugaaaatuugtgtataaaatuagauaaaaatggauaugattaauatattaauuguauatuttggtgaaagaataggttgttagauagatgaauaatgtatttgatatttgautgagtgaatatgtatgtatuaaataugttggutttttuuaauuugggatattgtgtatggaaaagaa

SEQ ID NO: 654 - DNA, 7858 bp, Papilloma virus
ttatgaaaattgttaatatgatgtatttttttttatattggtttttgttaatgttggtttttgttatgtatatttttgaaatatttttttatgtaatgttttattgtgtgaaattgttaggttttgttgttgggatgtttgatggtttaaatatgtgttttaatttatgtagtgatgttttgtatagataatggatatatataatgttttgttgtaattttgtgtgtttttatatagttaaatgaaaatttttaaatatatattatatatttttgatatattgtatatgatgtatggtatttatatatttgaaaataaggttttaattttttaattttataataagtttgagatatatatttttttgtgattttttttattgattatgttttaatatattaaataattattttatggatgttatggtttttggtaatttgggttgtttttttgtatttgtggaatttttgtttgtttttaaagtgttgtattgatttgttatggtttttgttatattatgtataatattggtttgtgttgttttttttgaagtgtttgtatttttttgtgtttatattgttatttatatgtatttggggttttttgtgatgttttttaatataatgtaaattttggagttttatttaatttaggataattggataatataatgtttgttaatttgtttagttttttttttttgttattttgtttattttaattagtatgtgttgatggttgggttgtttggtttggtgttgtagtgttttaaaatatatatataatatttatattgttgttttaatttgaatgttattttttgagttgttttttggaattttgtgatgttgttgataaaaatttgtggaataggaaatatataggtattatatgttgattggttattagatgttattgtttaggttttttatggttgttttttttttgttttatattattgattaagaaatatttttgttaatatttttttttttgttttttatattatagtttattatttttattttgatgttgtttatgttttagtttatattatttaaaataattgtgtgttaataggtaaatatttgtttgttttgttttttgttgtgtttgtaataaggtatgtgttttttaagttttattatgtgtttataatgtagaaaattttgtttttaaatgttttttgttgttttttttgttaggtaatttttttgttgatttatatttatgtttagatttaggtgttaatgttttttaaagtaatttattatttgtgtttttttgttttgttgttaataaatgttatagtttattattgatattgataagattttatttttgatgtttttgagtttattgatatttgtgattatgttttttattgttgttatatgtattatgtgttttattattatttttattattattgttatgttttttatatttaggtgtaatgttataatgttttgatttttttgataatgtttgtttattgtttttttgatgttatgattgttataaatttttgtatatatttgatagtaaatgtttaaattaatttttaaaatttttattattttgttgtatatgtttaatttattattgatataaattttaattaggttgttattgttttttgaaattttgtaattaatttggttgttgtaatatgtgggtataggttataaatttaatatttattttttataattataattgaaataattttatatttatattgtttttatttgattgataatgttttttgaatttgtgtaataatgtgtatggattttgtatatataattaatttggtggttttaatgttttattataatgttgtaatatgattatattttgtttatataggttataattattttatttatttttgtgtggatttatttatgtttttgattgttaataagttgtattataattgttattattaaaattaaatagtttgtattatgttatttgtaaattattattggaatgtttatttttattatattgtaaagttatatgggttaattgtttgatgttgttattatgttgatgtaaaaattttttattgatggtttggtttataaattttttaatatgatattatatatttgtaatatttttttgtgtttttgtggtttatttatatagagttatttaatttatatttataaggttttatttatttttatttttaatttttgggtattatgttaaggattttatagttttttattttaaataattgaaaaatttttgtgatttttttaaagaatttttttgtggtttttttttaatatatgataatatatttggatgtttatgtttttttagtataaaattttatttaaaatatgtaaaggatgttttatgttattatagtaaatatttaagtttgttggtaaaaattaattttggtaattgtttatgattttattggtataatttattatggtgtgtgtgtataatttgtataaaattattaatatattttttatgtaatttattattaggatatttatatttgttttttgtatttggtaataatgttgattttataggaggttaggataattgtaggttataattaggttgttttttattatttattggtataaattttttattttattgttataaatgtaaaggtgtatgtaaaggtaaattatttttattattaggttatatattttatttattatttttaatttttataaaaaaatttttttgtattaggtttaatttaaatgtgtttttgttatttttatgtttgtggtttttttagggaaagttttgtaaatttatgtaatgttttgttttatgatttggtgatatttttattgttatttttgtatttgttggtttatttaataattgttgaatatgtaaattttttatgttatgataaatgttgtttttttgtattataatggtttgatttggtggtttattatggaggataattgtaaagttttttgttttgtgtattttgataatttgatgtttattggaattttttggaatgtgttttgtttatattgttattttttatttgtgatgttttatgtatgttttttgatattttatgttttggtagtgttataaaattttttttgttattttggtatgtgtatatgaaattattgttgtttttgttgatatatttgatatattatattttgttatatataatatattgattttgtttttatattttgttttgttgttgtatataattgataattttatatataatatattttttatttttatggtgtataatatatgttaaatttttgtttatattttttatatttttattattatgtattttttatgttatatttttgttatattaattaatattattgagatatatgttatggttattgttgtgttataggtgatgagtttaataatttgttgatgttgtgtggaggtgtagttgggggttttggtgtaggtatttgtggggttttggggtgtaggtttgtggttgatgatttgttggatttgttatatttgagtgttttgttgtggtgtttgtatagttgtgggtgtatgtgttgggtgaggatataagtttatgtttattgttgtttttttttttttatatattattattgtgatgtggatattatgtgaattttttattgtttttgttaaattttataaattttatatttgatgtgtttatatgtttggtaatgagtttttataggaggtggattgtaatttgtttaatattatttttgtgattatataattgatattgtatattattattttatgtttttttatggaaaaatttatattaatgataaggattgttatatgtttagagttattttatgtattgatatatttagatatataatatatgttatatattgtaatgatatgatagaaattataaaaataatatgaaaagatatatggaaatatatatgatgttatagggtgaatatgttagatagatatatatatgaaaatgaattaataattataaagaaaaatattaataataatgtaggggtaattgttgtaaatgatatatgtaaataatgataaatgatggatataaatataatgtatatgtatgaaatgtgtggtatgttattaatgatattatatgttatgttatattgtatggatattatatgtataataatataaaaatataaaaatataaaaatataaaaatataaaatatataaattatttggtattatagggtggtatgttgtgtagtgtttgtttggagatgttgattgaatatattttgtatatttgttaggttatgtatggggggattataataattgttttattttttgtgttggaattgattattttaaaatgttattagattggaattttataaaaatttattggaattgtaattatggttgttattaagatttttggtatgtttgatatatgggaattttttgtttagattatgataatatttataattggggtgatttggtggatattaataatttggatattttggatgattaggtagataataatgtaattattttttaaggttataataatggagattatgaggttaagggtgtaaatggttttggagatttaaattttaatgtagaagattatgatggtgtggttgatataatttgtagtgtggatggtatttgagataaagataaagtagttgattaaaatgtttaggatgtaaaagattagggagataataattttatggggtttgttttttttatagtttattatataaataattatgtggttgtagtttgttggtatttatatttttttatggaaatgtttgtaaatgtagaagatttagtttatgttttgggtaattattatggggggagggatgatatgttgtttatgttttaggggtggatatattattttgattagttgtttaggtatataggtggagtgttaaaaattgtgtagggagtagtaattaatgtaaattattaggttgaatatttggggatttgtggtgtgataggaaatttggatggttattataaggattaaggttaaaatatttataataagtaaatgtatttggttgtaataggagatttgtattgtgataatttaaattatttaatttagttttttgttggtataaatgtgtattattatttgtttattttttattttatgtaaaaatggtattatatttggggtaatgatgatgttttttttaatttaatgttggaaattaattatgatgtttattattattggataaattatatatatgtttgaagggtggaggatgtaggtgatgtggattgtgatatgtgtttagtaaatgtataggttttataaggaattggtatggaagatgatgatgtaggagaatgttattataatgttatggtaattgtagatgtattttatatggatatatatgattgggtttgtaatataatggtagggtatgaggatatattggattatgtagaggatggttatgaaggtggtggtggatatatttataagtattgtgtgttataataaatattggtattataataataaaaggattttttgtatttgtataagggataaaaaaatgtttattgaaatattgttggattattgttatgttatatagaaggtggtggaagatattggttttaatagttgtgattattaatatatagagtgtgtttgtataaaatagtatgtttgttaagggttaataattgatatttgttaggtataaaattttaatatggattattatgtttattatttgtttgataaggattttataggtgtatagttatattttataaattttattgaaatgggttaggattatttaaatttaatggattaagatgatatatattaggattttgtgttgtaaattaaatttgtatatatttatatttttaattagtatttgttggaaatttataattggatttattggtaggtaaaatattatttaatttattatgttttttatgagtatgttgatgttgataataatgtgttttataatttttattatatagttaattaatatttgtttgtgttgatatataaaatttaatatatggatgataattatttgtgatttggtttttgtgtgaaatatttggatgtgttaatgttggattattgataggaggaaattttgaatttttgtggtaataatttttattattatattatttatgtttaatattttgttatttaaaattatgtaatgttttatgttttatgttttaaggtaatttgtaaatagttaggtagatatttataggtttaataaatgtttatagatgattagggatatttttaagatataaaaaaatggatgtggtatttgttgataaatgttttgtaaaaattttattttgtttataatatttattgtgttatggatgtttggatatataatttttgtgattgtgattatatgtattttggggattgttaatatatataaggggaagagggttattgagataataatgaagattaagagttaataaattatttggtataattaatgtattttgggttttggtattgttattataaataattgtattagttaataaataatgatattatttgtgatgggtgttatgattaaattgtaatatatggagatgtgttttaggatatggtttatgtatattgggatgatttaaatttgttatattatttgtatatttttttatattaaatgttaaataaaaagttaatatgtgataatgaaattgatgtttttaatatagtatataggtattatatttattattatataattttttaattttaaaattatagggaggtggtggatgatgtttaaattatttatgtatagtaaaatatgttagttaatgataatggatagtttttttatgatgtggaggtttttttgttttaggtatattatttaattttaaaatttgataattggattttttttttaaaaggaggttaaatttagttataggggaattagtttttaaaaattaagtttgatttaatgtagtatttggatggtattttggagtatttgtaggatgatgaaggtgtagatgatgtagatgatgtagatttggatggtttgtatatgtatatgtattattttttattatataattgtgtatatatatataaatatatatattaaaatatataatatatatatatatataaatatattatataatgatataaaataaataaatgtatgtatatatatatttatatggaatattgtatatattataatgatatgtattaatattataatttattttatatgattattataatatattttaatgtgggaatatttattgttatgataaatatatatatatataatgaaatatgggatataagaaaggatataaagtttaatatttgaatgtatgatgtgttgtaggtaaaatgaatattaggaggtaaaatgatatgttggttaaagttaatggatattgaatatatattggaaaatttgtattatggatttgattgtgtaaatgttggggatgtattaaattggatgattgtgtggaagaattgtatgtatattgtgtggattataattagtaaaaggataggtttatatgattttgttattgaatgtgttgatataggtgtgggatatattattttgatgaaaatttgtgtataaaattagataaaaatggatatgattaatatattaattgtatattttggtgaaagaataggttgttagatagatgaataatgtatttgatatttgattgagtgaatatgtatgtattaaatatgttggttttttttaatttgggatattgtgtatggaaaagaa

SEQ ID NO: 655 - DNA, 7808 bp, Papilloma virus
aacaattatcttgtaaaaactagggtgtaaccgaaaagggttatgaccgaaaacggtgcatataaaagtgcagtggtaaaagtatagaagaacaccatgttcgaagacaagagggaaagaccacgaacgctgcatgaattatgtgaagctttgaacgtttctatgcacaatatacaggtagtgtgtgtgtattgtaaaaaggaattatgtagagcagatgtatataatgtagcatttactgaaattaagattgtatatagggataataatccatatgcagtatgcaaacaatgtttactgttttattcaaaaattagagagtatagacgttatagcaggtctgtgtatggtactacattagaggcaattactaaaaaaagcttatatgatttatcgataaggtgtcatagatgtcaaagaccacttgggcctgaagaaaagcaaaaattggtggacgaaaaaaaaaggttccatgaaatagcgggacgttggacggggcaatgcgctaattgctggcaacgtacacgacaacgtaacgaaacccaagtgtaataaagccatgcgtggtaatgtaccacaattaaaagatgtagtattgcatttaacaccacagactgaaattgacttgcaatgctacgagcaatttgacagctcagaggaggaggatgaagtagataatatgcgtgaccagctaccagaaagacgggctggacaggctacgtgttacagaattgaagctccgtgttgcaggtgttcaagtgtagtacaactggcagtggaaagcagtggagacacccttcgcgttgtacagcagatgttaatgggcgaactaagcctggtttgcccgtgttgtgcgaacaactagcaacggcgatggactgtgaaggtacagaggatgagggggcggggtgtaatgggtggttttttgttgaagcaatagtagaaaaaaaaacaggagataatgtttcggatgatgaggatgaaaatgcagatgatacaggatctgatttaataaactttatagatagtgaaactagtatttgcagtcaggcggaacaggagacagcacgggcgttgtttcaggcccaagaattacaggcaaacaaagaggctgtgcatcagttaaaacgaaagtttctagtcagcccgcgaagcagcccattaggagacattacaaatcaaaacaacacacacagccatagtcaggcaaacgagtcacaagttaaaaggagattactggacagttatccggacagcggatatggcaatacacaagtggaaactgtggaagcaacgttgcaggtagatgggcaacatggcggttcacagaacagtgtgtgtagtagcggggggggcagtgttatggatgtggaaacaacagaaagctgtgcaaatgtagaactaaacagtatatgtgaagtattaaaaagcagtaatgcaaaagcaacgttaatggcaaaatttaaagagttgtatggtattagttataatgagttggtacgggtgtttaaaagtgataaaacatgttgtatagattgggtttgtgcattgtttggcgtttccccaatggtagcagaaaatttaaaaacactaattaagccattttgcatgtactaccatatacaatgtttatcatgtgattggggcaccattgtattaatgctaattaggttttcatgtgcaaaaaacagaacaacaattgctaagtgtttaagtacattagtaaatatcccacaatcacaaatgtttatagaaccaccaaaattacgtagtacacctgtggcattatatttttatagaacaggcatatcaaacattagcaatacatatggagagacacctgaatggattacacgacaaacgcaactacaacatagttttgaggatagtacctttgaattatcacaaatggtgcaatgggcatttgaccatgaagtattagatgatagtgaaatagcatttcattatgcacaattagcagatatagatagtaatgctgcagcgtttttaaagagtaattgccaagcaaaatatgtaaaagattgtgggaccatggcacggcattacaaacgagcacaaagaaaatcattatctatgtcagcctggataaggtatagatgtgatagagcaaaggatggaggcaactggagagaaattgctaaatttttaagatatcaaggtgtaaactttatgtcctttattcaaatgtttaaacagtttttaaaaggaacaccaaaacacaattgcatagtcatatatggcccaccaaacacaggcaagtcattatttgcaatgagcctaatgaagtttatgcaagggtccattatttcatatgtaaactctggtagtcatttttggttacagccactagaggatgctaaaatagcattgttagatgatgctacgtatgggtgttggacatatattgatcagtatttaagaaactttttagatggtaatccatgtagtatagatagaaaacataggagtttaatacaattagtatgtccaccattactaataacgtcaaacataaatccacaagaggatgcaaacctaatgtatttacatacaagggtaacagtattaaagtttttaaatacatttccatttgataacaatgggaatgctgtgtatacattgaatgatgaaaattggaaaaattttttttccaccacatggtccagattagatttggaggaggaagaggacaaagaaaatggagaccctatgccaccgtttaaatgtgtgccaggagaaaatactagactgttatgaactggacagtgataaattagtagatcaaattaactattggacattgttacgatatgaagctgctatgttttatgcagcacgggaaagaaacttacgaacaatcaatcaccaggtagtaccagcaacaacagtatcaaaacaaaaggcctgtcaagcaattgaaatgcacatggccttacaatcgcttaacaaatcagactataacatggaaccatggacaatgcgggagacatgttatgaactatggtgtgtggctcccaagcaatgtttcaaaaaggggggcataactgtaacagttatatttgatggaaataaggacaatgcaatggactatacaagctggaaatttatatatatatatgataatgataagtgggtaaagacaaatggaaatgtggactatacgggtatatattacactgtaaattcaaaaaaagaatattatgtacagtttaaagatgaagccaaaatatatggggcacaacagtgggaggtctatatgtatggtactgtaataacatgtcctgaatatgtatctagtacctgcagcgacgcgttatccactactacaactgttgaacaactatcaaacaccccaacgaccaatccccttaccacctgcgtgggcgccaaagaagcccagacacaacagcgaaaacgacagcgacttactgagcccgactcctccacaatctccccactgtccgtggacaatacaaacaaccaaatacactgtggaagtggaagcactaacactggagggcaccaaagtgcaactcagactgcgtttatagtgcatttaaaaggtgatacaaattgtttaaaatgttttagatacagatttacaaaacacaaagggttatataaaaacgtatcctcaacctggcattggaccagtaatactaaaacaggcattgttaccattgtgtttgacagtgcacatcaacgggaaacatttataaaaaccattaaagtacccccaagtgtaacactgtcattgggaattatgacactgtaactagtgtaatatatgtattgtacatatatactgtcacaagccaatatgtgctgctaattgtatagacatattgtaaccattgcagtgtttattattttgctatttgtgctttgcttgtgtgtgtgtcttgtgttgtgttgtttgttgccgctactgctgtcccaatacgtgtttgcagctgccttattattaattttatgtttttggtttgttgttgcaacatcccaattaactacattttttgtatatttgatttttttttacttaccttgtttacttttacatctatatacatttttacttttgcaataaacttgttatatttttgtgattaaatatggtggctacacgtgcacggcgtcggaagcgagcatctgtaacacaattatattctacatgcaaagctgctggtacatgtcctcctgatgttgtgaataaggttgaaggtactacattggccgataaaatattacagtggagtgggttgggtatatttttgggtggcctaggtattggtactgggtctggatctggggggcgtactggatatatccctttaggtggtgggggtcgcccaggcgtggtggatattgctcctgcaaggccacctattataattgacctatggcaccatactgaaccttctatagtaaatttggttgaggactctagtattattcagtctgggtctcctatacctacctttactggtaccgatggctttgaaattacttcatcttccacaacaacccctgctgtgttggacatcaccccatctgctggtactgtacatgtttctagtactaacattgaaaatcctttatatattgaacctccatccattgaggctccacaatctggagaagtgtcagatatatatttactagtacactactctggtactcatgggtatgaagaaatacctatggaagtgtttgcatccaatgtcagtactggtactgaacctattagcagcacacctactccaggggttagtcgcatagctgctccccgcttgtatagtaagtcctacacacaggttaaagttacaaatcctgattttattagtaagccatccacatttgttacatttaataatcctgcttttgagcctattgacacatccataacttttgaggaacctgatgctgttgcacctgatcctgattttctggatattattacactgcaccgccctgcccttacatctcgtagaggcacagtacgctttagtaggttaggtcaaaaggccaccatgcgcactcgtagtggcaaacaaattggtgctcgtgtacattattatcatgatattagtagaattgcaccagctgatgaacttgaaatgcagcctttactttcaccttctaataattatagttatgacatttatgctgatttagatgaagctgaaacaggttttatacagcccacacacaccacacctatgtcacactcctctttgtctaggcagttgccctccttatcttcatctatgtcttcatcttatgcaaatgttactattccattttcaactacatattctgttcctattcatacagggcctgatgtggtattgcccacatctcctacagtatggccttatgttccccacacttccattgacaccaagcattctattgttatactaggtggggattactatttgtggccctatacacatttactacgcaaacgccgtaaacgtataccctatttttttacagatggcattgtggcgcactaatgacagcaaggtgtatttgccacctgcacctgtgtctcgaattgtgaatacagaagaatatatcacacgcaccggcatatattactatgcaggcagttccagactaataacattaggacatccctattttccaatacctaaaacctcaacgcgtgctgctattcctaaagtatctgcatttcaatacagggtatttagggtacagttaccagatcctaacaagtttggactcccggatccaaatttatataatccagacacagataggttggtgtggggttgtgtgggcgttgaggtgggcagaggacagccccttggtgttggccttagtggtcatcccttatttaataaatatgatgacacagaaaattcacgcatagcaaatggcaatgcacaacaagatgttagagataacacatctgttgacaacaaacagactcagttatgtataataggctgtgctccacctattggggaacactggggtattggcactacatgcaaaaacacacctgtacctccaggagactgcccccccctggaacttgtatcctctgtcattcaggatggcgatatgattgatacagggtttggagctatggatttcgctgccctacaggccaccaaatcagacgtccctttggatatttcacagtctgtttgtaaatatcctgattatttaaaaatgtctgcagacacatatggtaattccatgttttttcatttacgcagggagcaaatctttgctaggcactattataataaacttgtaggtgttggggaagacattcctaacgattattatattaagggtagtggtaatggccgtgaccctatagaaagttatatatactctgctactcccagtgggtctatgataacatctgattctcaaatttttaataagccttattggctccaccgtgcgcagggtcacaataatggcatttgctggaacaatcagctttttattacctgtgttgatactaccagaagtacaaatttaactattagcactgccactgctgcggtttccccaacatttactccaagtaactttaagcaatatattaggcatggggaagagtatgaattgcaatttatttttcaattatgtaaaattactttaactacagaggtaatggcttatttacacacaatggatcctaccattcttgaacagtggaattttggattaacattacctccgtctgctagtttggaggatgcatataggtttgttagaaatgcagctactagctgtcaaaaggacacccctccacaggctaagccagatcctttggccaaatataaattttgggatgttgatttaaaggaacgattttctttagatttagaccaatttgcattgggtcgcaagtttttgttgcaggttggcgtacaacgcaagcccagaccaggccttaaacgcccggcctcatcggcatcctcttcctcttcctcttcagccaaacgtaaacgtgttaaaaagtaatgtatgttagtttttgtatgcttgtgcacactgttgtatgcctgtatgtatatgtttgtgtatgtactgtatgtgtttttgtgtgtgtgtgtgttgttgttcctgtatgtatgagttatgtatgtttattattaataaactatgtggtgtgtgtgtgtgtgtttttgcatgactgcatttgtatgacatgtacgggtgtatgtgggtattacattatccccgtaggtcaagggtggtgtttcggtggcgtccctattgccctacccattttttgcagcacaacagtttatatttgtgctatttagttatactttgtagcttccattttgttacagctgcagccattttgagtgcaaccgatttcggttcgtgtacttttagtatatttgccaagttttaaaccacaactgccagttgtttttggcataaaccatcatttttttatgacatagtgcatacatccgcccgcccacgccttgtacttggcgcgccttaccggcgctagtcatacaacctattagtcatttgtactttaacaattgttggcacactgttttccgccctataataatttaactgcttataggcatgtattttttggcatattttatcttactaattgcatagttggcaggtcaaatactatgtttttagtgccaagtttctatcctacttataaaccatcttactcatatgcaggtgtgctacacaaatgtgttacctaaccgatttgtgttctgcctatgcttgcaacattttttcttataacattt

SEQ ID NO: 656 - DNA, 7808 bp, Papilloma virus
aauaattatuttgtaaaaautagggtgtaauugaaaagggttatgauugaaaauggtguatataaaagtguagtggtaaaagtatagaagaauauuatgttugaagauaagagggaaagauuaugaaugutguatgaattatgtgaagutttgaaugtttutatguauaatatauaggtagtgtgtgtgtattgtaaaaaggaattatgtagaguagatgtatataatgtaguatttautgaaattaagattgtatatagggataataatuuatatguagtatguaaauaatgtttautgttttattuaaaaattagagagtatagaugttataguaggtutgtgtatggtautauattagagguaattautaaaaaaaguttatatgatttatugataaggtgtuatagatgtuaaagauuauttggguutgaagaaaaguaaaaattggtggaugaaaaaaaaaggttuuatgaaatagugggaugttggaugggguaatgugutaattgutgguaaugtauaugauaaugtaaugaaauuuaagtgtaataaaguuatgugtggtaatgtauuauaattaaaagatgtagtattguatttaauauuauagautgaaattgauttguaatgutaugaguaatttgauagutuagaggaggaggatgaagtagataatatgugtgauuagutauuagaaagaugggutggauaggutaugtgttauagaattgaagutuugtgttguaggtgttuaagtgtagtauaautgguagtggaaaguagtggagauauuuttugugttgtauaguagatgttaatgggugaautaaguutggtttguuugtgttgtgugaauaautaguaauggugatggautgtgaaggtauagaggatgaggggguggggtgtaatgggtggttttttgttgaaguaatagtagaaaaaaaaauaggagataatgtttuggatgatgaggatgaaaatguagatgatauaggatutgatttaataaautttatagatagtgaaautagtatttguagtuagguggaauaggagauaguaugggugttgtttuagguuuaagaattauagguaaauaaagaggutgtguatuagttaaaaugaaagtttutagtuaguuugugaaguaguuuattaggagauattauaaatuaaaauaauauauauaguuatagtuagguaaaugagtuauaagttaaaaggagattautggauagttatuuggauaguggatatgguaatauauaagtggaaautgtggaaguaaugttguaggtagatggguaauatgguggttuauagaauagtgtgtgtagtagugggggggguagtgttatggatgtggaaauaauagaaagutgtguaaatgtagaautaaauagtatatgtgaagtattaaaaaguagtaatguaaaaguaaugttaatgguaaaatttaaagagttgtatggtattagttataatgagttggtaugggtgtttaaaagtgataaaauatgttgtatagattgggtttgtguattgtttggugtttuuuuaatggtaguagaaaatttaaaaauautaattaaguuattttguatgtautauuatatauaatgtttatuatgtgattgggguauuattgtattaatgutaattaggttttuatgtguaaaaaauagaauaauaattgutaagtgtttaagtauattagtaaatatuuuauaatuauaaatgtttatagaauuauuaaaattaugtagtauauutgtgguattatatttttatagaauagguatatuaaauattaguaatauatatggagagauauutgaatggattauaugauaaauguaautauaauatagttttgaggatagtauutttgaattatuauaaatggtguaatggguatttgauuatgaagtattagatgatagtgaaataguatttuattatguauaattaguagatatagatagtaatgutguagugtttttaaagagtaattguuaaguaaaatatgtaaaagattgtgggauuatgguaugguattauaaaugaguauaaagaaaatuattatutatgtuaguutggataaggtatagatgtgatagaguaaaggatggagguaautggagagaaattgutaaatttttaagatatuaaggtgtaaautttatgtuutttattuaaatgtttaaauagtttttaaaaggaauauuaaaauauaattguatagtuatatatgguuuauuaaauauagguaagtuattatttguaatgaguutaatgaagtttatguaagggtuuattatttuatatgtaaaututggtagtuatttttggttauaguuautagaggatgutaaaataguattgttagatgatgutaugtatgggtgttggauatatattgatuagtatttaagaaautttttagatggtaatuuatgtagtatagatagaaaauataggagtttaatauaattagtatgtuuauuattautaataaugtuaaauataaatuuauaagaggatguaaauutaatgtatttauatauaagggtaauagtattaaagtttttaaatauatttuuatttgataauaatgggaatgutgtgtatauattgaatgatgaaaattggaaaaattttttttuuauuauatggtuuagattagatttggaggaggaagaggauaaagaaaatggagauuutatguuauugtttaaatgtgtguuaggagaaaatautagautgttatgaautggauagtgataaattagtagatuaaattaautattggauattgttaugatatgaagutgutatgttttatguaguaugggaaagaaauttaugaauaatuaatuauuaggtagtauuaguaauaauagtatuaaaauaaaagguutgtuaaguaattgaaatguauatgguuttauaatuguttaauaaatuagautataauatggaauuatggauaatgugggagauatgttatgaautatggtgtgtggutuuuaaguaatgtttuaaaaagggggguataautgtaauagttatatttgatggaaataaggauaatguaatggautatauaagutggaaatttatatatatatatgataatgataagtgggtaaagauaaatggaaatgtggautataugggtatatattauautgtaaattuaaaaaaagaatattatgtauagtttaaagatgaaguuaaaatatatgggguauaauagtgggaggtutatatgtatggtautgtaataauatgtuutgaatatgtatutagtauutguagugaugugttatuuautautauaautgttgaauaautatuaaauauuuuaaugauuaatuuuuttauuauutgugtggguguuaaagaaguuuagauauaauagugaaaaugauagugauttautgaguuugautuutuuauaatutuuuuautgtuugtggauaatauaaauaauuaaatauautgtggaagtggaaguautaauautggaggguauuaaagtguaautuagautgugtttatagtguatttaaaaggtgatauaaattgtttaaaatgttttagatauagatttauaaaauauaaagggttatataaaaaugtatuutuaauutgguattggauuagtaatautaaaauagguattgttauuattgtgtttgauagtguauatuaaugggaaauatttataaaaauuattaaagtauuuuuaagtgtaauautgtuattgggaattatgauautgtaautagtgtaatatatgtattgtauatatatautgtuauaaguuaatatgtgutgutaattgtatagauatattgtaauuattguagtgtttattattttgutatttgtgutttguttgtgtgtgtgtuttgtgttgtgttgtttgttguugutautgutgtuuuaataugtgtttguagutguuttattattaattttatgtttttggtttgttgttguaauatuuuaattaautauattttttgtatatttgatttttttttauttauuttgtttauttttauatutatatauatttttauttttguaataaauttgttatatttttgtgattaaatatggtggutauaugtguauggugtuggaagugaguatutgtaauauaattatattutauatguaaagutgutggtauatgtuutuutgatgttgtgaataaggttgaaggtautauattgguugataaaatattauagtggagtgggttgggtatatttttgggtgguutaggtattggtautgggtutggatutggggggugtautggatatatuuutttaggtggtgggggtuguuuaggugtggtggatattgutuutguaagguuauutattataattgauutatgguauuatautgaauuttutatagtaaatttggttgaggaututagtattattuagtutgggtutuutatauutauutttautggtauugatggutttgaaattauttuatuttuuauaauaauuuutgutgtgttggauatuauuuuatutgutggtautgtauatgtttutagtautaauattgaaaatuutttatatattgaauutuuatuuattgaggutuuauaatutggagaagtgtuagatatatatttautagtauautaututggtautuatgggtatgaagaaatauutatggaagtgtttguatuuaatgtuagtautggtautgaauutattaguaguauauutautuuaggggttagtuguatagutgutuuuuguttgtatagtaagtuutauauauaggttaaagttauaaatuutgattttattagtaaguuatuuauatttgttauatttaataatuutguttttgaguutattgauauatuuataauttttgaggaauutgatgutgttguauutgatuutgattttutggatattattauautguauuguuutguuuttauatutugtagagguauagtaugutttagtaggttaggtuaaaagguuauuatguguautugtagtgguaaauaaattggtgutugtgtauattattatuatgatattagtagaattguauuagutgatgaauttgaaatguaguutttautttuauuttutaataattatagttatgauatttatgutgatttagatgaagutgaaauaggttttatauaguuuauauauauuauauutatgtuauautuututttgtutagguagttguuutuuttatuttuatutatgtuttuatuttatguaaatgttautattuuattttuaautauatattutgttuutattuatauaggguutgatgtggtattguuuauatutuutauagtatgguuttatgttuuuuauauttuuattgauauuaaguattutattgttatautaggtggggattautatttgtgguuutatauauatttautauguaaauguugtaaaugtatauuutatttttttauagatgguattgtgguguautaatgauaguaaggtgtatttguuauutguauutgtgtutugaattgtgaatauagaagaatatatuauauguauugguatatattautatguagguagttuuagautaataauattaggauatuuutattttuuaatauutaaaauutuaaugugtgutgutattuutaaagtatutguatttuaatauagggtatttagggtauagttauuagatuutaauaagtttggautuuuggatuuaaatttatataatuuagauauagataggttggtgtggggttgtgtgggugttgaggtggguagaggauaguuuuttggtgttgguuttagtggtuatuuuttatttaataaatatgatgauauagaaaattuauguataguaaatgguaatguauaauaagatgttagagataauauatutgttgauaauaaauagautuagttatgtataataggutgtgutuuauutattggggaauautggggtattgguautauatguaaaaauauauutgtauutuuaggagautguuuuuuuutggaauttgtatuututgtuattuaggatggugatatgattgatauagggtttggagutatggatttugutguuutauagguuauuaaatuagaugtuuutttggatatttuauagtutgtttgtaaatatuutgattatttaaaaatgtutguagauauatatggtaattuuatgttttttuatttauguagggaguaaatutttgutagguautattataataaauttgtaggtgttggggaagauattuutaaugattattatattaagggtagtggtaatgguugtgauuutatagaaagttatatataututgutautuuuagtgggtutatgataauatutgattutuaaatttttaataaguuttattggutuuauugtguguagggtuauaataatgguatttgutggaauaatuagutttttattauutgtgttgatautauuagaagtauaaatttaautattaguautguuautgutguggtttuuuuaauatttautuuaagtaautttaaguaatatattagguatggggaagagtatgaattguaatttatttttuaattatgtaaaattautttaautauagaggtaatgguttatttauauauaatggatuutauuattuttgaauagtggaattttggattaauattauutuugtutgutagtttggaggatguatataggtttgttagaaatguagutautagutgtuaaaaggauauuuutuuauaggutaaguuagatuutttgguuaaatataaattttgggatgttgatttaaaggaaugattttutttagatttagauuaatttguattgggtuguaagtttttgttguaggttggugtauaauguaaguuuagauuagguuttaaauguuugguutuatugguatuututtuututtuututtuaguuaaaugtaaaugtgttaaaaagtaatgtatgttagtttttgtatguttgtguauautgttgtatguutgtatgtatatgtttgtgtatgtautgtatgtgtttttgtgtgtgtgtgtgttgttgttuutgtatgtatgagttatgtatgtttattattaataaautatgtggtgtgtgtgtgtgtgtttttguatgautguatttgtatgauatgtaugggtgtatgtgggtattauattatuuuugtaggtuaagggtggtgtttuggtggugtuuutattguuutauuuattttttguaguauaauagtttatatttgtgutatttagttatautttgtaguttuuattttgttauagutguaguuattttgagtguaauugatttuggttugtgtauttttagtatatttguuaagttttaaauuauaautguuagttgtttttgguataaauuatuatttttttatgauatagtguatauatuuguuuguuuauguuttgtauttgguguguuttauuggugutagtuatauaauutattagtuatttgtautttaauaattgttgguauautgttttuuguuutataataatttaautguttatagguatgtattttttgguatattttatuttautaattguatagttgguaggtuaaatautatgtttttagtguuaagtttutatuutauttataaauuatuttautuatatguaggtgtgutauauaaatgtgttauutaauugatttgtgttutguutatguttguaauattttttuttataauattt

SEQ ID NO: 657 - DNA, 7808 bp, Papilloma virus
aataattattttgtaaaaattagggtgtaattgaaaagggttatgattgaaaatggtgtatataaaagtgtagtggtaaaagtatagaagaatattatgtttgaagataagagggaaagattatgaatgttgtatgaattatgtgaagttttgaatgtttttatgtataatatataggtagtgtgtgtgtattgtaaaaaggaattatgtagagtagatgtatataatgtagtatttattgaaattaagattgtatatagggataataatttatatgtagtatgtaaataatgtttattgttttatttaaaaattagagagtatagatgttatagtaggtttgtgtatggtattatattagaggtaattattaaaaaaagtttatatgatttattgataaggtgttatagatgttaaagattatttgggtttgaagaaaagtaaaaattggtggatgaaaaaaaaaggttttatgaaatagtgggatgttggatggggtaatgtgttaattgttggtaatgtatatgataatgtaatgaaatttaagtgtaataaagttatgtgtggtaatgtattataattaaaagatgtagtattgtatttaatattatagattgaaattgatttgtaatgttatgagtaatttgatagtttagaggaggaggatgaagtagataatatgtgtgattagttattagaaagatgggttggataggttatgtgttatagaattgaagttttgtgttgtaggtgtttaagtgtagtataattggtagtggaaagtagtggagatattttttgtgttgtatagtagatgttaatgggtgaattaagtttggtttgtttgtgttgtgtgaataattagtaatggtgatggattgtgaaggtatagaggatgagggggtggggtgtaatgggtggttttttgttgaagtaatagtagaaaaaaaaataggagataatgttttggatgatgaggatgaaaatgtagatgatataggatttgatttaataaattttatagatagtgaaattagtatttgtagttaggtggaataggagatagtatgggtgttgttttaggtttaagaattataggtaaataaagaggttgtgtattagttaaaatgaaagtttttagttagtttgtgaagtagtttattaggagatattataaattaaaataatatatatagttatagttaggtaaatgagttataagttaaaaggagattattggatagttatttggatagtggatatggtaatatataagtggaaattgtggaagtaatgttgtaggtagatgggtaatatggtggtttatagaatagtgtgtgtagtagtggggggggtagtgttatggatgtggaaataatagaaagttgtgtaaatgtagaattaaatagtatatgtgaagtattaaaaagtagtaatgtaaaagtaatgttaatggtaaaatttaaagagttgtatggtattagttataatgagttggtatgggtgtttaaaagtgataaaatatgttgtatagattgggtttgtgtattgtttggtgtttttttaatggtagtagaaaatttaaaaatattaattaagttattttgtatgtattattatatataatgtttattatgtgattggggtattattgtattaatgttaattaggtttttatgtgtaaaaaatagaataataattgttaagtgtttaagtatattagtaaatattttataattataaatgtttatagaattattaaaattatgtagtatatttgtggtattatatttttatagaataggtatattaaatattagtaatatatatggagagatatttgaatggattatatgataaatgtaattataatatagttttgaggatagtatttttgaattattataaatggtgtaatgggtatttgattatgaagtattagatgatagtgaaatagtattttattatgtataattagtagatatagatagtaatgttgtagtgtttttaaagagtaattgttaagtaaaatatgtaaaagattgtgggattatggtatggtattataaatgagtataaagaaaattattatttatgttagtttggataaggtatagatgtgatagagtaaaggatggaggtaattggagagaaattgttaaatttttaagatattaaggtgtaaattttatgttttttatttaaatgtttaaatagtttttaaaaggaatattaaaatataattgtatagttatatatggtttattaaatataggtaagttattatttgtaatgagtttaatgaagtttatgtaagggtttattattttatatgtaaattttggtagttatttttggttatagttattagaggatgttaaaatagtattgttagatgatgttatgtatgggtgttggatatatattgattagtatttaagaaattttttagatggtaatttatgtagtatagatagaaaatataggagtttaatataattagtatgtttattattattaataatgttaaatataaatttataagaggatgtaaatttaatgtatttatatataagggtaatagtattaaagtttttaaatatatttttatttgataataatgggaatgttgtgtatatattgaatgatgaaaattggaaaaattttttttttattatatggtttagattagatttggaggaggaagaggataaagaaaatggagattttatgttattgtttaaatgtgtgttaggagaaaatattagattgttatgaattggatagtgataaattagtagattaaattaattattggatattgttatgatatgaagttgttatgttttatgtagtatgggaaagaaatttatgaataattaattattaggtagtattagtaataatagtattaaaataaaaggtttgttaagtaattgaaatgtatatggttttataattgtttaataaattagattataatatggaattatggataatgtgggagatatgttatgaattatggtgtgtggtttttaagtaatgttttaaaaaggggggtataattgtaatagttatatttgatggaaataaggataatgtaatggattatataagttggaaatttatatatatatatgataatgataagtgggtaaagataaatggaaatgtggattatatgggtatatattatattgtaaatttaaaaaaagaatattatgtatagtttaaagatgaagttaaaatatatggggtataatagtgggaggtttatatgtatggtattgtaataatatgttttgaatatgtatttagtatttgtagtgatgtgttatttattattataattgttgaataattattaaatattttaatgattaatttttttattatttgtgtgggtgttaaagaagtttagatataatagtgaaaatgatagtgatttattgagtttgatttttttataatttttttattgtttgtggataatataaataattaaatatattgtggaagtggaagtattaatattggagggtattaaagtgtaatttagattgtgtttatagtgtatttaaaaggtgatataaattgtttaaaatgttttagatatagatttataaaatataaagggttatataaaaatgtatttttaatttggtattggattagtaatattaaaataggtattgttattattgtgtttgatagtgtatattaatgggaaatatttataaaaattattaaagtatttttaagtgtaatattgttattgggaattatgatattgtaattagtgtaatatatgtattgtatatatatattgttataagttaatatgtgttgttaattgtatagatatattgtaattattgtagtgtttattattttgttatttgtgttttgtttgtgtgtgtgttttgtgttgtgttgtttgttgttgttattgttgttttaatatgtgtttgtagttgttttattattaattttatgtttttggtttgttgttgtaatattttaattaattatattttttgtatatttgatttttttttatttattttgtttatttttatatttatatatatttttatttttgtaataaatttgttatatttttgtgattaaatatggtggttatatgtgtatggtgttggaagtgagtatttgtaatataattatattttatatgtaaagttgttggtatatgtttttttgatgttgtgaataaggttgaaggtattatattggttgataaaatattatagtggagtgggttgggtatatttttgggtggtttaggtattggtattgggtttggatttggggggtgtattggatatatttttttaggtggtgggggttgtttaggtgtggtggatattgtttttgtaaggttatttattataattgatttatggtattatattgaattttttatagtaaatttggttgaggattttagtattatttagtttgggttttttatatttatttttattggtattgatggttttgaaattattttattttttataataatttttgttgtgttggatattattttatttgttggtattgtatatgtttttagtattaatattgaaaattttttatatattgaatttttatttattgaggttttataatttggagaagtgttagatatatatttattagtatattattttggtatttatgggtatgaagaaatatttatggaagtgtttgtatttaatgttagtattggtattgaatttattagtagtatatttattttaggggttagttgtatagttgttttttgtttgtatagtaagttttatatataggttaaagttataaattttgattttattagtaagttatttatatttgttatatttaataattttgtttttgagtttattgatatatttataatttttgaggaatttgatgttgttgtatttgattttgattttttggatattattatattgtattgttttgtttttatattttgtagaggtatagtatgttttagtaggttaggttaaaaggttattatgtgtatttgtagtggtaaataaattggtgtttgtgtatattattattatgatattagtagaattgtattagttgatgaatttgaaatgtagtttttatttttattttttaataattatagttatgatatttatgttgatttagatgaagttgaaataggttttatatagtttatatatattatatttatgttatatttttttttgtttaggtagttgttttttttatttttatttatgtttttattttatgtaaatgttattattttatttttaattatatattttgtttttatttatatagggtttgatgtggtattgtttatattttttatagtatggttttatgttttttatatttttattgatattaagtattttattgttatattaggtggggattattatttgtggttttatatatatttattatgtaaatgttgtaaatgtatattttatttttttatagatggtattgtggtgtattaatgatagtaaggtgtatttgttatttgtatttgtgttttgaattgtgaatatagaagaatatattatatgtattggtatatattattatgtaggtagttttagattaataatattaggatatttttattttttaatatttaaaattttaatgtgtgttgttatttttaaagtatttgtattttaatatagggtatttagggtatagttattagattttaataagtttggatttttggatttaaatttatataatttagatatagataggttggtgtggggttgtgtgggtgttgaggtgggtagaggatagttttttggtgttggttttagtggttattttttatttaataaatatgatgatatagaaaatttatgtatagtaaatggtaatgtataataagatgttagagataatatatttgttgataataaatagatttagttatgtataataggttgtgttttatttattggggaatattggggtattggtattatatgtaaaaatatatttgtatttttaggagattgtttttttttggaatttgtattttttgttatttaggatggtgatatgattgatatagggtttggagttatggattttgttgttttataggttattaaattagatgtttttttggatattttatagtttgtttgtaaatattttgattatttaaaaatgtttgtagatatatatggtaattttatgtttttttatttatgtagggagtaaatttttgttaggtattattataataaatttgtaggtgttggggaagatatttttaatgattattatattaagggtagtggtaatggttgtgattttatagaaagttatatatattttgttatttttagtgggtttatgataatatttgatttttaaatttttaataagttttattggttttattgtgtgtagggttataataatggtatttgttggaataattagttttttattatttgtgttgatattattagaagtataaatttaattattagtattgttattgttgtggtttttttaatatttattttaagtaattttaagtaatatattaggtatggggaagagtatgaattgtaatttattttttaattatgtaaaattattttaattatagaggtaatggtttatttatatataatggattttattatttttgaatagtggaattttggattaatattatttttgtttgttagtttggaggatgtatataggtttgttagaaatgtagttattagttgttaaaaggatatttttttataggttaagttagattttttggttaaatataaattttgggatgttgatttaaaggaatgattttttttagatttagattaatttgtattgggttgtaagtttttgttgtaggttggtgtataatgtaagtttagattaggttttaaatgtttggttttattggtattttttttttttttttttttagttaaatgtaaatgtgttaaaaagtaatgtatgttagtttttgtatgtttgtgtatattgttgtatgtttgtatgtatatgtttgtgtatgtattgtatgtgtttttgtgtgtgtgtgtgttgttgtttttgtatgtatgagttatgtatgtttattattaataaattatgtggtgtgtgtgtgtgtgtttttgtatgattgtatttgtatgatatgtatgggtgtatgtgggtattatattatttttgtaggttaagggtggtgttttggtggtgtttttattgttttatttattttttgtagtataatagtttatatttgtgttatttagttatattttgtagtttttattttgttatagttgtagttattttgagtgtaattgattttggtttgtgtatttttagtatatttgttaagttttaaattataattgttagttgtttttggtataaattattatttttttatgatatagtgtatatatttgtttgtttatgttttgtatttggtgtgttttattggtgttagttatataatttattagttatttgtattttaataattgttggtatattgttttttgttttataataatttaattgtttataggtatgtattttttggtatattttattttattaattgtatagttggtaggttaaatattatgtttttagtgttaagtttttattttatttataaattattttatttatatgtaggtgtgttatataaatgtgttatttaattgatttgtgttttgtttatgtttgtaatatttttttttataatattt

SEQ ID NO: 658 - DNA, 7808 bp, Papilloma virus
ttgttaatagaacatttttgatcccacattggcttttcccaatactggcttttgccacgtatattttcacgtcaccattttcatatcttcttgtggtacaagcttctgttctccctttctggtgcttgcgacgtacttaatacacttcgaaacttgcaaagatacgtgttatatgtccatcacacacacataacatttttccttaatacatctcgtctacatatattacatcgtaaatgactttaattctaacatatatccctattattaggtatacgtcatacgtttgttacaaatgacaaaataagtttttaatctctcatatctgcaatatcgtccagacacataccatgatgtaatctccgttaatgatttttttcgaatatactaaatagctattccacagtatctacagtttctggtgaacccggacttcttttcgtttttaaccacctgctttttttttccaaggtactttatcgccctgcaacctgccccgttacgcgattaacgaccgttgcatgtgctgttgcattgctttgggttcacattatttcggtacgcaccattacatggtgttaattttctacatcataacgtaaattgtggtgtctgactttaactgaacgttacgatgctcgttaaactgtcgagtctcctcctcctacttcatctattatacgcactggtcgatggtctttctgcccgacctgtccgatgcacaatgtcttaacttcgaggcacaacgtccacaagttcacatcatgttgaccgtcacctttcgtcacctctgtgggaagcgcaacatgtcgtctacaattacccgcttgattcggaccaaacgggcacaacacgcttgttgatcgttgccgctacctgacacttccatgtctcctactcccccgccccacattacccaccaaaaaacaacttcgttatcatctttttttttgtcctctattacaaagcctactactcctacttttacgtctactatgtcctagactaaattatttgaaatatctatcactttgatcataaacgtcagtccgccttgtcctctgtcgtgcccgcaacaaagtccgggttcttaatgtccgtttgtttctccgacacgtagtcaattttgctttcaaagatcagtcgggcgcttcgtcgggtaatcctctgtaatgtttagttttgttgtgtgtgtcggtatcagtccgtttgctcagtgttcaattttcctctaatgacctgtcaataggcctgtcgcctataccgttatgtgttcacctttgacaccttcgttgcaacgtccatctacccgttgtaccgccaagtgtcttgtcacacacatcatcgccccccccgtcacaatacctacacctttgttgtctttcgacacgtttacatcttgatttgtcatatacacttcataatttttcgtcattacgttttcgttgcaattaccgttttaaatttctcaacataccataatcaatattactcaaccatgcccacaaattttcactattttgtacaacatatctaacccaaacacgtaacaaaccgcaaaggggttaccatcgtcttttaaatttttgtgattaattcggtaaaacgtacatgatggtatatgttacaaatagtacactaaccccgtggtaacataattacgattaatccaaaagtacacgttttttgtcttgttgttaacgattcacaaattcatgtaatcatttatagggtgttagtgtttacaaatatcttggtggttttaatgcatcatgtggacaccgtaatataaaaatatcttgtccgtatagtttgtaatcgttatgtatacctctctgtggacttacctaatgtgctgtttgcgttgatgttgtatcaaaactcctatcatggaaacttaatagtgtttaccacgttacccgtaaactggtacttcataatctactatcactttatcgtaaagtaatacgtgttaatcgtctatatctatcattacgacgtcgcaaaaatttctcattaacggttcgttttatacattttctaacaccctggtaccgtgccgtaatgtttgctcgtgtttcttttagtaatagatacagtcggacctattccatatctacactatctcgtttcctacctccgttgacctctctttaacgatttaaaaattctatagttccacatttgaaatacaggaaataagtttacaaatttgtcaaaaattttccttgtggttttgtgttaacgtatcagtatataccgggtggtttgtgtccgttcagtaataaacgttactcggattacttcaaatacgttcccaggtaataaagtatacatttgagaccatcagtaaaaaccaatgtcggtgatctcctacgattttatcgtaacaatctactacgatgcatacccacaacctgtatataactagtcataaattctttgaaaaatctaccattaggtacatcatatctatcttttgtatcctcaaattatgttaatcatacaggtggtaatgattattgcagtttgtatttaggtgttctcctacgtttggattacataaatgtatgttcccattgtcataatttcaaaaatttatgtaaaggtaaactattgttacccttacgacacatatgtaacttactacttttaacctttttaaaaaaaaggtggtgtaccaggtctaatctaaacctcctccttctcctgtttcttttacctctgggatacggtggcaaatttacacacggtcctcttttatgatctgacaatacttgacctgtcactatttaatcatctagtttaattgataacctgtaacaatgctatacttcgacgatacaaaatacgtcgtgccctttctttgaatgcttgttagttagtggtccatcatggtcgttgttgtcatagttttgttttccggacagttcgttaactttacgtgtaccggaatgttagcgaattgtttagtctgatattgtaccttggtacctgttacgccctctgtacaatacttgataccacacaccgagggttcgttacaaagtttttccccccgtattgacattgtcaatataaactacctttattcctgttacgttacctgatatgttcgacctttaaatatatatatatactattactattcacccatttctgtttacctttacacctgatatgcccatatataatgtgacatttaagtttttttcttataatacatgtcaaatttctacttcggttttatataccccgtgttgtcaccctccagatatacataccatgacattattgtacaggacttatacatagatcatggacgtcgctgcgcaataggtgatgatgttgacaacttgttgatagtttgtggggttgctggttaggggaatggtggacgcacccgcggtttcttcgggtctgtgttgtcgcttttgctgtcgctgaatgactcgggctgaggaggtgttagaggggtgacaggcacctgttatgtttgttggtttatgtgacaccttcaccttcgtgattgtgacctcccgtggtttcacgttgagtctgacgcaaatatcacgtaaattttccactatgtttaacaaattttacaaaatctatgtctaaatgttttgtgtttcccaatatatttttgcataggagttggaccgtaacctggtcattatgattttgtccgtaacaatggtaacacaaactgtcacgtgtagttgccctttgtaaatatttttggtaatttcatgggggttcacattgtgacagtaacccttaatactgtgacattgatcacattatatacataacatgtatatatgacagtgttcggttatacacgacgattaacatatctgtataacattggtaacgtcacaaataataaaacgataaacacgaaacgaacacacacacagaacacaacacaacaaacaacggcgatgacgacagggttatgcacaaacgtcgacggaataataattaaaatacaaaaaccaaacaacaacgttgtagggttaattgatgtaaaaaacatataaactaaaaaaaaatgaatggaacaaatgaaaatgtagatatatgtaaaaatgaaaacgttatttgaacaatataaaaacactaatttataccaccgatgtgcacgtgccgcagccttcgctcgtagacattgtgttaatataagatgtacgtttcgacgaccatgtacaggaggactacaacacttattccaacttccatgatgtaaccggctattttataatgtcacctcacccaacccatataaaaacccaccggatccataaccatgacccagacctagaccccccgcatgacctatatagggaaatccaccacccccagcgggtccgcaccacctataacgaggacgttccggtggataatattaactggataccgtggtatgacttggaagatatcatttaaaccaactcctgagatcataataagtcagacccagaggatatggatggaaatgaccatggctaccgaaactttaatgaagtagaaggtgttgttggggacgacacaacctgtagtggggtagacgaccatgacatgtacaaagatcatgattgtaacttttaggaaatatataacttggaggtaggtaactccgaggtgttagacctcttcacagtctatatataaatgatcatgtgatgagaccatgagtacccatacttctttatggataccttcacaaacgtaggttacagtcatgaccatgacttggataatcgtcgtgtggatgaggtccccaatcagcgtatcgacgaggggcgaacatatcattcaggatgtgtgtccaatttcaatgtttaggactaaaataatcattcggtaggtgtaaacaatgtaaattattaggacgaaaactcggataactgtgtaggtattgaaaactccttggactacgacaacgtggactaggactaaaagacctataataatgtgacgtggcgggacgggaatgtagagcatctccgtgtcatgcgaaatcatccaatccagttttccggtggtacgcgtgagcatcaccgtttgtttaaccacgagcacatgtaataatagtactataatcatcttaacgtggtcgactacttgaactttacgtcggaaatgaaagtggaagattattaatatcaatactgtaaatacgactaaatctacttcgactttgtccaaaatatgtcgggtgtgtgtggtgtggatacagtgtgaggagaaacagatccgtcaacgggaggaatagaagtagatacagaagtagaatacgtttacaatgataaggtaaaagttgatgtataagacaaggataagtatgtcccggactacaccataacgggtgtagaggatgtcataccggaatacaaggggtgtgaaggtaactgtggttcgtaagataacaatatgatccacccctaatgataaacaccgggatatgtgtaaatgatgcgtttgcggcatttgcatatgggataaaaaaatgtctaccgtaacaccgcgtgattactgtcgttccacataaacggtggacgtggacacagagcttaacacttatgtcttcttatatagtgtgcgtggccgtatataatgatacgtccgtcaaggtctgattattgtaatcctgtagggataaaaggttatggattttggagttgcgcacgacgataaggatttcatagacgtaaagttatgtcccataaatcccatgtcaatggtctaggattgttcaaacctgagggcctaggtttaaatatattaggtctgtgtctatccaaccacaccccaacacacccgcaactccacccgtctcctgtcggggaaccacaaccggaatcaccagtagggaataaattatttatactactgtgtcttttaagtgcgtatcgtttaccgttacgtgttgttctacaatctctattgtgtagacaactgttgtttgtctgagtcaatacatattatccgacacgaggtggataaccccttgtgaccccataaccgtgatgtacgtttttgtgtggacatggaggtcctctgacggggggggaccttgaacataggagacagtaagtcctaccgctatactaactatgtcccaaacctcgatacctaaagcgacgggatgtccggtggtttagtctgcagggaaacctataaagtgtcagacaaacatttataggactaataaatttttacagacgtctgtgtataccattaaggtacaaaaaagtaaatgcgtccctcgtttagaaacgatccgtgataatattatttgaacatccacaaccccttctgtaaggattgctaataatataattcccatcaccattaccggcactgggatatctttcaatatatatgagacgatgagggtcacccagatactattgtagactaagagtttaaaaattattcggaataaccgaggtggcacgcgtcccagtgttattaccgtaaacgaccttgttagtcgaaaaataatggacacaactatgatggtcttcatgtttaaattgataatcgtgacggtgacgacgccaaaggggttgtaaatgaggttcattgaaattcgttatataatccgtaccccttctcatacttaacgttaaataaaaagttaatacattttaatgaaattgatgtctccattaccgaataaatgtgtgttacctaggatggtaagaacttgtcaccttaaaacctaattgtaatggaggcagacgatcaaacctcctacgtatatccaaacaatctttacgtcgatgatcgacagttttcctgtggggaggtgtccgattcggtctaggaaaccggtttatatttaaaaccctacaactaaatttccttgctaaaagaaatctaaatctggttaaacgtaacccagcgttcaaaaacaacgtccaaccgcatgttgcgttcgggtctggtccggaatttgcgggccggagtagccgtaggagaaggagaaggagaagtcggtttgcatttgcacaatttttcattacatacaatcaaaaacatacgaacacgtgtgacaacatacggacatacatatacaaacacatacatgacatacacaaaaacacacacacacacaacaacaaggacatacatactcaatacatacaaataataattatttgatacaccacacacacacacacaaaaacgtactgacgtaaacatactgtacatgcccacatacacccataatgtaataggggcatccagttcccaccacaaagccaccgcagggataacgggatgggtaaaaaacgtcgtgttgtcaaatataaacacgataaatcaatatgaaacatcgaaggtaaaacaatgtcgacgtcggtaaaactcacgttggctaaagccaagcacatgaaaatcatataaacggttcaaaatttggtgttgacggtcaacaaaaaccgtatttggtagtaaaaaaatactgtatcacgtatgtaggcgggcgggtgcggaacatgaaccgcgcggaatggccgcgatcagtatgttggataatcagtaaacatgaaattgttaacaaccgtgtgacaaaaggcgggatattattaaattgacgaatatccgtacataaaaaaccgtataaaatagaatgattaacgtatcaaccgtccagtttatgatacaaaaatcacggttcaaagataggatgaatatttggtagaatgagtatacgtccacacgatgtgtttacacaatggattggctaaacacaagacggatacgaacgttgtaaaaaagaatattgtaaa

SEQ ID NO: 659 - DNA, 7808 bp, Papilloma virus
ttgttaatagaauatttttgatuuuauattgguttttuuuaatautgguttttguuaugtatattttuaugtuauuattttuatatuttuttgtggtauaaguttutgttutuuutttutggtguttgugaugtauttaatauauttugaaauttguaaagataugtgttatatgtuuatuauauauauataauatttttuuttaatauatutugtutauatatattauatugtaaatgautttaattutaauatatatuuutattattaggtataugtuataugtttgttauaaatgauaaaataagtttttaatututuatatutguaatatugtuuagauauatauuatgatgtaatutuugttaatgatttttttugaatatautaaatagutattuuauagtatutauagtttutggtgaauuuggauttuttttugtttttaauuauutgutttttttttuuaaggtautttatuguuutguaauutguuuugttaugugattaaugauugttguatgtgutgttguattgutttgggttuauattatttuggtauguauuattauatggtgttaattttutauatuataaugtaaattgtggtgtutgautttaautgaaugttaugatgutugttaaautgtugagtutuutuutuutauttuatutattatauguautggtugatggtutttutguuugauutgtuugatguauaatgtuttaauttugagguauaaugtuuauaagttuauatuatgttgauugtuauutttugtuauututgtgggaaguguaauatgtugtutauaattauuuguttgattuggauuaaauggguauaauauguttgttgatugttguugutauutgauauttuuatgtutuutautuuuuuguuuuauattauuuauuaaaaaauaauttugttatuatutttttttttgtuututattauaaaguutautautuutauttttaugtutautatgtuutagautaaattatttgaaatatutatuautttgatuataaaugtuagtuuguuttgtuututgtugtguuuguaauaaagtuugggttuttaatgtuugtttgtttutuugauaugtagtuaattttgutttuaaagatuagtuggguguttugtugggtaatuututgtaatgtttagttttgttgtgtgtgtuggtatuagtuugtttgutuagtgttuaattttuututaatgauutgtuaatagguutgtuguutatauugttatgtgttuauutttgauauuttugttguaaugtuuatutauuugttgtauuguuaagtgtuttgtuauauauatuatuguuuuuuuugtuauaatauutauauutttgttgtutttugauaugtttauatuttgatttgtuatatauauttuataatttttugtuattaugttttugttguaattauugttttaaatttutuaauatauuataatuaatattautuaauuatguuuauaaattttuautattttgtauaauatatutaauuuaaauaugtaauaaauuguaaaggggttauuatugtuttttaaatttttgtgattaattuggtaaaaugtauatgatggtatatgttauaaatagtauautaauuuugtggtaauataattaugattaatuuaaaagtauaugttttttgtuttgttgttaaugattuauaaattuatgtaatuatttatagggtgttagtgtttauaaatatuttggtggttttaatguatuatgtggauauugtaatataaaaatatuttgtuugtatagtttgtaatugttatgtatauutututgtggauttauutaatgtgutgtttgugttgatgttgtatuaaaautuutatuatggaaauttaatagtgtttauuaugttauuugtaaautggtauttuataatutautatuautttatugtaaagtaataugtgttaatugtutatatutatuattaugaugtuguaaaaatttutuattaauggttugttttatauattttutaauauuutggtauugtguugtaatgtttgutugtgtttuttttagtaatagatauagtuggauutattuuatatutauautatutugtttuutauutuugttgauutututttaaugatttaaaaattutatagttuuauatttgaaatauaggaaataagtttauaaatttgtuaaaaattttuuttgtggttttgtgttaaugtatuagtatatauugggtggtttgtgtuugttuagtaataaaugttautuggattauttuaaataugttuuuaggtaataaagtatauatttgagauuatuagtaaaaauuaatgtuggtgatutuutaugattttatugtaauaatutautaugatguatauuuauaauutgtatataautagtuataaattutttgaaaaatutauuattaggtauatuatatutatuttttgtatuutuaaattatgttaatuatauaggtggtaatgattattguagtttgtatttaggtgttutuutaugtttggattauataaatgtatgttuuuattgtuataatttuaaaaatttatgtaaaggtaaautattgttauuuttaugauauatatgtaauttautauttttaauutttttaaaaaaaaggtggtgtauuaggtutaatutaaauutuutuuttutuutgtttuttttauututgggatauggtgguaaatttauauauggtuututtttatgatutgauaatauttgauutgtuautatttaatuatutagtttaattgataauutgtaauaatgutatauttugaugatauaaaataugtugtguuutttutttgaatguttgttagttagtggtuuatuatggtugttgttgtuatagttttgttttuuggauagttugttaautttaugtgtauuggaatgttagugaattgtttagtutgatattgtauuttggtauutgttauguuututgtauaatauttgatauuauauauugagggttugttauaaagtttttuuuuuugtattgauattgtuaatataaautauutttattuutgttaugttauutgatatgttugauutttaaatatatatatatautattautattuauuuatttutgtttauutttauauutgatatguuuatatataatgtgauatttaagtttttttuttataatauatgtuaaatttutauttuggttttatatauuuugtgttgtuauuutuuagatatauatauuatgauattattgtauaggauttatauatagatuatggaugtugutguguaataggtgatgatgttgauaauttgttgatagtttgtggggttgutggttaggggaatggtggauguauuuguggtttuttugggtutgtgttgtuguttttgutgtugutgaatgautugggutgaggaggtgttagaggggtgauagguauutgttatgtttgttggtttatgtgauauuttuauuttugtgattgtgauutuuugtggtttuaugttgagtutgauguaaatatuaugtaaattttuuautatgtttaauaaattttauaaaatutatgtutaaatgttttgtgtttuuuaatatatttttguataggagttggauugtaauutggtuattatgattttgtuugtaauaatggtaauauaaautgtuaugtgtagttguuutttgtaaatatttttggtaatttuatgggggttuauattgtgauagtaauuuttaatautgtgauattgatuauattatatauataauatgtatatatgauagtgttuggttatauaugaugattaauatatutgtataauattggtaaugtuauaaataataaaaugataaauaugaaaugaauauauauauagaauauaauauaauaaauaauggugatgaugauagggttatguauaaaugtugauggaataataattaaaatauaaaaauuaaauaauaaugttgtagggttaattgatgtaaaaaauatataaautaaaaaaaaatgaatggaauaaatgaaaatgtagatatatgtaaaaatgaaaaugttatttgaauaatataaaaauautaatttatauuauugatgtguaugtguuguaguuttugutugtagauattgtgttaatataagatgtaugtttugaugauuatgtauaggaggautauaauauttattuuaauttuuatgatgtaauuggutattttataatgtuauutuauuuaauuuatataaaaauuuauuggatuuataauuatgauuuagauutagauuuuuuguatgauutatatagggaaatuuauuauuuuuagugggtuuguauuauutataaugaggaugttuuggtggataatattaautggatauugtggtatgauttggaagatatuatttaaauuaautuutgagatuataataagtuagauuuagaggatatggatggaaatgauuatggutauugaaautttaatgaagtagaaggtgttgttggggaugauauaauutgtagtggggtagaugauuatgauatgtauaaagatuatgattgtaauttttaggaaatatataauttggaggtaggtaautuugaggtgttagauututtuauagtutatatataaatgatuatgtgatgagauuatgagtauuuatauttutttatggatauuttuauaaaugtaggttauagtuatgauuatgauttggataatugtugtgtggatgaggtuuuuaatuagugtatugaugaggggugaauatatuattuaggatgtgtgtuuaatttuaatgtttaggautaaaataatuattuggtaggtgtaaauaatgtaaattattaggaugaaaautuggataautgtgtaggtattgaaaautuuttggautaugauaaugtggautaggautaaaagauutataataatgtgaugtggugggaugggaatgtagaguatutuugtgtuatgugaaatuatuuaatuuagttttuuggtggtaugugtgaguatuauugtttgtttaauuaugaguauatgtaataatagtautataatuatuttaaugtggtugautauttgaautttaugtuggaaatgaaagtggaagattattaatatuaatautgtaaataugautaaatutauttugautttgtuuaaaatatgtugggtgtgtgtggtgtggatauagtgtgaggagaaauagatuugtuaaugggaggaatagaagtagatauagaagtagaataugtttauaatgataaggtaaaagttgatgtataagauaaggataagtatgtuuuggautauauuataaugggtgtagaggatgtuatauuggaatauaaggggtgtgaaggtaautgtggttugtaagataauaatatgatuuauuuutaatgataaauauugggatatgtgtaaatgatgugtttgugguatttguatatgggataaaaaaatgtutauugtaauauugugtgattautgtugttuuauataaauggtggaugtggauauagaguttaauauttatgtuttuttatatagtgtgugtgguugtatataatgataugtuugtuaaggtutgattattgtaatuutgtagggataaaaggttatggattttggagttguguaugaugataaggatttuatagaugtaaagttatgtuuuataaatuuuatgtuaatggtutaggattgttuaaauutgaggguutaggtttaaatatattaggtutgtgtutatuuaauuauauuuuaauauauuuguaautuuauuugtutuutgtuggggaauuauaauuggaatuauuagtagggaataaattatttatautautgtgtuttttaagtgugtatugtttauugttaugtgttgttutauaatututattgtgtagauaautgttgtttgtutgagtuaatauatattatuugauaugaggtggataauuuuttgtgauuuuataauugtgatgtaugtttttgtgtggauatggaggtuututgauggggggggauuttgaauataggagauagtaagtuutauugutatautaautatgtuuuaaauutugatauutaaagugaugggatgtuuggtggtttagtutguagggaaauutataaagtgtuagauaaauatttataggautaataaatttttauagaugtutgtgtatauuattaaggtauaaaaaagtaaatgugtuuutugtttagaaaugatuugtgataatattatttgaauatuuauaauuuuttutgtaaggattgutaataatataattuuuatuauuattauugguautgggatatutttuaatatatatgagaugatgagggtuauuuagatautattgtagautaagagtttaaaaattattuggaataauugaggtgguaugugtuuuagtgttattauugtaaaugauuttgttagtugaaaaataatggauauaautatgatggtuttuatgtttaaattgataatugtgauggtgaugauguuaaaggggttgtaaatgaggttuattgaaattugttatataatuugtauuuuttutuatauttaaugttaaataaaaagttaatauattttaatgaaattgatgtutuuattauugaataaatgtgtgttauutaggatggtaagaauttgtuauuttaaaauutaattgtaatggagguagaugatuaaauutuutaugtatatuuaaauaatutttaugtugatgatugauagttttuutgtggggaggtgtuugattuggtutaggaaauuggtttatatttaaaauuutauaautaaatttuuttgutaaaagaaatutaaatutggttaaaugtaauuuagugttuaaaaauaaugtuuaauuguatgttgugttugggtutggtuuggaatttguggguuggagtaguugtaggagaaggagaaggagaagtuggtttguatttguauaatttttuattauatauaatuaaaaauataugaauaugtgtgauaauatauggauatauatatauaaauauatauatgauatauauaaaaauauauauauauauaauaauaaggauatauatautuaatauatauaaataataattatttgatauauuauauauauauauauaaaaaugtautgaugtaaauatautgtauatguuuauatauauuuataatgtaatagggguatuuagttuuuauuauaaaguuauuguagggataaugggatgggtaaaaaaugtugtgttgtuaaatataaauaugataaatuaatatgaaauatugaaggtaaaauaatgtugaugtuggtaaaautuaugttggutaaaguuaaguauatgaaaatuatataaauggttuaaaatttggtgttgauggtuaauaaaaauugtatttggtagtaaaaaaatautgtatuaugtatgtaggugggugggtguggaauatgaauuguguggaatgguugugatuagtatgttggataatuagtaaauatgaaattgttaauaauugtgtgauaaaaggugggatattattaaattgaugaatatuugtauataaaaaauugtataaaatagaatgattaaugtatuaauugtuuagtttatgatauaaaaatuauggttuaaagataggatgaatatttggtagaatgagtataugtuuauaugatgtgtttauauaatggattggutaaauauaagauggataugaaugttgtaaaaaagaatattgtaaa

SEQ ID NO: 660 - DNA, 7808 bp, Papilloma virus
ttgttaatagaatatttttgattttatattggttttttttaatattggtttttgttatgtatatttttatgttattatttttatatttttttgtggtataagtttttgttttttttttttggtgtttgtgatgtatttaatatattttgaaatttgtaaagatatgtgttatatgtttattatatatatataatatttttttttaatatattttgtttatatatattatattgtaaatgattttaattttaatatatatttttattattaggtatatgttatatgtttgttataaatgataaaataagtttttaattttttatatttgtaatattgtttagatatatattatgatgtaatttttgttaatgattttttttgaatatattaaatagttattttatagtatttatagtttttggtgaatttggatttttttttgtttttaattatttgttttttttttttaaggtattttattgttttgtaatttgttttgttatgtgattaatgattgttgtatgtgttgttgtattgttttgggtttatattattttggtatgtattattatatggtgttaattttttatattataatgtaaattgtggtgtttgattttaattgaatgttatgatgtttgttaaattgttgagttttttttttttattttatttattatatgtattggttgatggtttttttgtttgatttgtttgatgtataatgttttaattttgaggtataatgtttataagtttatattatgttgattgttattttttgttatttttgtgggaagtgtaatatgttgtttataattatttgtttgatttggattaaatgggtataatatgtttgttgattgttgttgttatttgatatttttatgttttttatttttttgttttatattatttattaaaaaataattttgttattatttttttttttgttttttattataaagtttattatttttatttttatgtttattatgttttagattaaattatttgaaatatttattattttgattataaatgttagtttgttttgttttttgttgtgtttgtaataaagtttgggtttttaatgtttgtttgtttttttgatatgtagttaattttgtttttaaagattagttgggtgttttgttgggtaattttttgtaatgtttagttttgttgtgtgtgttggtattagtttgtttgtttagtgtttaatttttttttaatgatttgttaataggtttgttgtttatattgttatgtgtttatttttgatatttttgttgtaatgtttatttatttgttgtattgttaagtgttttgttatatatattattgttttttttgttataatatttatatttttgttgttttttgatatgtttatattttgatttgttatatatattttataattttttgttattatgtttttgttgtaattattgttttaaattttttaatatattataattaatattatttaattatgtttataaatttttattattttgtataatatatttaatttaaatatgtaataaattgtaaaggggttattattgttttttaaatttttgtgattaatttggtaaaatgtatatgatggtatatgttataaatagtatattaattttgtggtaatataattatgattaatttaaaagtatatgttttttgttttgttgttaatgatttataaatttatgtaattatttatagggtgttagtgtttataaatattttggtggttttaatgtattatgtggatattgtaatataaaaatattttgtttgtatagtttgtaattgttatgtatatttttttgtggatttatttaatgtgttgtttgtgttgatgttgtattaaaatttttattatggaaatttaatagtgtttattatgttatttgtaaattggtattttataatttattattattttattgtaaagtaatatgtgttaattgtttatatttattattatgatgttgtaaaaattttttattaatggtttgttttatatattttttaatattttggtattgtgttgtaatgtttgtttgtgttttttttagtaatagatatagttggatttattttatatttatattattttgttttttatttttgttgatttttttttaatgatttaaaaattttatagttttatatttgaaatataggaaataagtttataaatttgttaaaaattttttttgtggttttgtgttaatgtattagtatatattgggtggtttgtgtttgtttagtaataaatgttatttggattattttaaatatgtttttaggtaataaagtatatatttgagattattagtaaaaattaatgttggtgattttttatgattttattgtaataatttattatgatgtatatttataatttgtatataattagttataaattttttgaaaaatttattattaggtatattatatttattttttgtatttttaaattatgttaattatataggtggtaatgattattgtagtttgtatttaggtgtttttttatgtttggattatataaatgtatgtttttattgttataattttaaaaatttatgtaaaggtaaattattgttatttttatgatatatatgtaatttattatttttaatttttttaaaaaaaaggtggtgtattaggtttaatttaaatttttttttttttttgttttttttatttttgggatatggtggtaaatttatatatggtttttttttatgatttgataatatttgatttgttattatttaattatttagtttaattgataatttgtaataatgttatattttgatgatataaaatatgttgtgttttttttttgaatgtttgttagttagtggtttattatggttgttgttgttatagttttgttttttggatagtttgttaattttatgtgtattggaatgttagtgaattgtttagtttgatattgtattttggtatttgttatgttttttgtataatatttgatattatatattgagggtttgttataaagtttttttttttgtattgatattgttaatataaattatttttatttttgttatgttatttgatatgtttgatttttaaatatatatatatattattattatttatttatttttgtttatttttatatttgatatgtttatatataatgtgatatttaagttttttttttataatatatgttaaatttttattttggttttatatattttgtgttgttattttttagatatatatattatgatattattgtataggatttatatatagattatggatgttgttgtgtaataggtgatgatgttgataatttgttgatagtttgtggggttgttggttaggggaatggtggatgtatttgtggtttttttgggtttgtgttgttgtttttgttgttgttgaatgatttgggttgaggaggtgttagaggggtgataggtatttgttatgtttgttggtttatgtgatatttttatttttgtgattgtgattttttgtggttttatgttgagtttgatgtaaatattatgtaaattttttattatgtttaataaattttataaaatttatgtttaaatgttttgtgttttttaatatatttttgtataggagttggattgtaatttggttattatgattttgtttgtaataatggtaatataaattgttatgtgtagttgttttttgtaaatatttttggtaattttatgggggtttatattgtgatagtaatttttaatattgtgatattgattatattatatatataatatgtatatatgatagtgtttggttatatatgatgattaatatatttgtataatattggtaatgttataaataataaaatgataaatatgaaatgaatatatatatagaatataatataataaataatggtgatgatgatagggttatgtataaatgttgatggaataataattaaaatataaaaattaaataataatgttgtagggttaattgatgtaaaaaatatataaattaaaaaaaaatgaatggaataaatgaaaatgtagatatatgtaaaaatgaaaatgttatttgaataatataaaaatattaatttatattattgatgtgtatgtgttgtagtttttgtttgtagatattgtgttaatataagatgtatgttttgatgattatgtataggaggattataatatttattttaatttttatgatgtaattggttattttataatgttattttatttaatttatataaaaatttattggatttataattatgatttagatttagattttttgtatgatttatatagggaaatttattatttttagtgggtttgtattatttataatgaggatgttttggtggataatattaattggatattgtggtatgatttggaagatattatttaaattaatttttgagattataataagttagatttagaggatatggatggaaatgattatggttattgaaattttaatgaagtagaaggtgttgttggggatgatataatttgtagtggggtagatgattatgatatgtataaagattatgattgtaatttttaggaaatatataatttggaggtaggtaattttgaggtgttagatttttttatagtttatatataaatgattatgtgatgagattatgagtatttatatttttttatggatatttttataaatgtaggttatagttatgattatgatttggataattgttgtgtggatgaggtttttaattagtgtattgatgaggggtgaatatattatttaggatgtgtgtttaattttaatgtttaggattaaaataattatttggtaggtgtaaataatgtaaattattaggatgaaaatttggataattgtgtaggtattgaaaattttttggattatgataatgtggattaggattaaaagatttataataatgtgatgtggtgggatgggaatgtagagtatttttgtgttatgtgaaattatttaatttagttttttggtggtatgtgtgagtattattgtttgtttaattatgagtatatgtaataatagtattataattattttaatgtggttgattatttgaattttatgttggaaatgaaagtggaagattattaatattaatattgtaaatatgattaaatttattttgattttgtttaaaatatgttgggtgtgtgtggtgtggatatagtgtgaggagaaatagatttgttaatgggaggaatagaagtagatatagaagtagaatatgtttataatgataaggtaaaagttgatgtataagataaggataagtatgttttggattatattataatgggtgtagaggatgttatattggaatataaggggtgtgaaggtaattgtggtttgtaagataataatatgatttatttttaatgataaatattgggatatgtgtaaatgatgtgtttgtggtatttgtatatgggataaaaaaatgtttattgtaatattgtgtgattattgttgttttatataaatggtggatgtggatatagagtttaatatttatgtttttttatatagtgtgtgtggttgtatataatgatatgtttgttaaggtttgattattgtaattttgtagggataaaaggttatggattttggagttgtgtatgatgataaggattttatagatgtaaagttatgttttataaattttatgttaatggtttaggattgtttaaatttgagggtttaggtttaaatatattaggtttgtgtttatttaattatattttaatatatttgtaattttatttgttttttgttggggaattataattggaattattagtagggaataaattatttatattattgtgttttttaagtgtgtattgtttattgttatgtgttgttttataatttttattgtgtagataattgttgtttgtttgagttaatatatattatttgatatgaggtggataattttttgtgattttataattgtgatgtatgtttttgtgtggatatggaggttttttgatggggggggattttgaatataggagatagtaagttttattgttatattaattatgttttaaattttgatatttaaagtgatgggatgtttggtggtttagtttgtagggaaatttataaagtgttagataaatatttataggattaataaatttttatagatgtttgtgtatattattaaggtataaaaaagtaaatgtgttttttgtttagaaatgatttgtgataatattatttgaatatttataattttttttgtaaggattgttaataatataatttttattattattattggtattgggatattttttaatatatatgagatgatgagggttatttagatattattgtagattaagagtttaaaaattatttggaataattgaggtggtatgtgttttagtgttattattgtaaatgattttgttagttgaaaaataatggatataattatgatggtttttatgtttaaattgataattgtgatggtgatgatgttaaaggggttgtaaatgaggtttattgaaatttgttatataatttgtatttttttttatatttaatgttaaataaaaagttaatatattttaatgaaattgatgtttttattattgaataaatgtgtgttatttaggatggtaagaatttgttattttaaaatttaattgtaatggaggtagatgattaaattttttatgtatatttaaataatttttatgttgatgattgatagtttttttgtggggaggtgtttgatttggtttaggaaattggtttatatttaaaattttataattaaatttttttgttaaaagaaatttaaatttggttaaatgtaatttagtgtttaaaaataatgtttaattgtatgttgtgtttgggtttggtttggaatttgtgggttggagtagttgtaggagaaggagaaggagaagttggtttgtatttgtataattttttattatatataattaaaaatatatgaatatgtgtgataatatatggatatatatatataaatatatatatgatatatataaaaatatatatatatataataataaggatatatatatttaatatatataaataataattatttgatatattatatatatatatataaaaatgtattgatgtaaatatattgtatatgtttatatatatttataatgtaataggggtatttagtttttattataaagttattgtagggataatgggatgggtaaaaaatgttgtgttgttaaatataaatatgataaattaatatgaaatattgaaggtaaaataatgttgatgttggtaaaatttatgttggttaaagttaagtatatgaaaattatataaatggtttaaaatttggtgttgatggttaataaaaattgtatttggtagtaaaaaaatattgtattatgtatgtaggtgggtgggtgtggaatatgaattgtgtggaatggttgtgattagtatgttggataattagtaaatatgaaattgttaataattgtgtgataaaaggtgggatattattaaattgatgaatatttgtatataaaaaattgtataaaatagaatgattaatgtattaattgtttagtttatgatataaaaattatggtttaaagataggatgaatatttggtagaatgagtatatgtttatatgatgtgtttatataatggattggttaaatataagatggatatgaatgttgtaaaaaagaatattgtaaa

SEQ ID NO: 661 - DNA, 7942 bp, Papilloma virus
taaattataatcttatactagtaaaaaatagggtgtaaccgaaaacggtcagaccgaaaccggtgtatatatatagaacacagtgtagctaacgcacggccatgtttgaggatccagcaacacgaccccggaccctgcacgaattgtgtgaggtgctggaagaatcggtgcatgaaataaggctgcagtgtgtgcagtgcaaaaaagagctacaacgaagagaggtatacaagtttctatttacagatttacgaatagtatatagagacaataatccatatggcgtgtgtattatgtgcctacgctttttatctaagataagtgaatataggcattatcaatattcactgtatgggaaaacattagaagagagggtaaaaaaaccattaagtgaaataactattagatgtataatttgtcaaacgccattatgtcctgaagaaaaagaaagacatgttaatgcaaacaagcgatttcataatattatgggtcgttggacagggcgctgttcagagtgttggagaccccgacctgtgacccaagtgtaacgtcatgcgtggagacaaagcaactataaaagattatatattagatctgcaacctgaaacaactgacctacactgctatgagcaattaggtgacagctcagatgaggaggatacagatggtgtggaccggccagatggacaagcagaacaagccacaagcaattactacattgtgacatattgtcacagttgtgatagcacactacggctatgcattcatagcactgcgacggaccttcgtactctacagcaaatgctgttgggcacattacaagttgtgtgccccggctgtgcacggctataaacaaccctgcaatggaggaccctgaaggtacagagggcgaaagggagggatgtacaggctggtttgaagtagaggcaataatagaaaaacaaacaggagataacatttcagaggacgaggatgaaaatgcatatgatagtggaacagatctaatagattttatagatgattcaaatataaataatgaacaggcagaacatgaggcagcccgggcattgtttaatgcacaggaaggggaggatgatttacatgctgtgtctgcagtaaaacgaaagtttacaagcagtccggaaagtgctgggcaagatggtgtagaaaaacatggtagtccgcgtgcaaaacacatttgtgtaaatacagagtgtgttttaccaaaacgcaaaccatgtcacgtagaagacagcggctatggcaatagtgaagtggaagcgcagcagatggcagaccaggtagacgggcaaaatggcgactggcaaagtaacagtagtcaatcaagtggggtgggggctagtaattcagatgtaagttgtactagtatagaggacaatgaggaaaatagtaatagaacgctaaaaagcatacaaaatattatgtgcgaaaatagcataaaaacaactgtattatttaaatttaaagaaacatatggtgttagctttatggaattagtaagaccatttaaaagtaatagaagtagttgtacagattggtgtattataggaatgggagtaacaccatcagttgcagaaggattaaaagtattaatacagccctatagcatatatgcccatttgcaatgtttaacatgtgacagaggcgtgcttatactgctgctaattaggtttaaatgtggaaaaaacagattaacagtgtccaaactaatgtcacagctgttaaatataccagaaacacatatggtaatagaaccaccaaaattacgaagtgctacctgtgcattatattggtatagaacaggtttgtctaatattagtgaggtatatggtaccaccccagaatggatagaacaacaaacagtattacagcatagctttgacaatagcatattcgattttggagaaatggtgcaatgggcatatgatcatgatataacagatgatagtgacatagcatataaatatgcacagttagcagatgtaaatagcaatgctgcagcattcctaaaaagcaattcgcaagcaaaaatagtaaaggactgtgcaaccatgtgtagacattataaacgggcagaaagaaaacatatgaatattggacaatggatacagtatagatgtgatagaatagatgatggtggagattggaggcctatagtaagatttttaagatatcaagacatagaatttacagcctttttagacgcatttaaaaaatttttaaaaggtatacctaaaaaaaattgtttagtattatatggacctgcaaacacaggaaaatcatattttggaatgagtttaattaggttcttaagtggatgtgtaatatcctatgtaaactcaaaaagccatttttggctacaaccattaacagatgcaaaagtgggtatgatagatgatgtaacacctatatgttggacatatatagatgattatatgagaaatgcactggatggaaatgatatatcagtagatgtaaagcatagagccttagtacaaataaaatgcccaccattaattttaacaacaaatacaaatgcaggaacagatcctaggtggccatatttacatagtagattggttgtgtttcatttcaaaaacccatttccatttgatgaaaatggcaatcctatatatgaaattaacaacgaaaattggaaatcctttttctcaaggacgtggtgcaaattagatttaatacaggaagaggacaaggaaaacgatggagtcgataccggcacgtttaaatgcagtgcaggaaaaaatactagatctatacgaagctgatagtaatgacctaaacgcacaaattgaacattggaaattgactcgaatggaatgtgttttgttttacaaagcaaaggaactgggaataactcatataggccaccaggtggtgccaccaatggcagtgtctaaggcaaaggcctgccaagctattgaactacaattggcattggaggcattaaacaaaacacaatatagcacagatggatggacattacaacaaacaagtctagaaatgtggcgtgcagaaccacaaaaatactttaaaaaacatgggtatacaataacagtgcaatacgataatgataaaaacaatactatggattatacaaactggaaggaaatttatttacttggtgagtgtgaatgtacaattgtagaaggacaagtagattactatgggttatattattggtgtgatggagaaaaaatatattttgtaaaatttagtaacgatgcaaagcaatattgtgtaacaggagtatgggaagtacatgtgggtggtcaggtaattgtttgtcctgcatctgtatctagtaacgaagtatccactactgaaactgctgtccacctatgcaccgaaacctccaagacctccgcagtgtccgtgggtgccaaagacacacacctacaaccaccacagaaacgacgacgaccagacgtcacagactccagaaacaccaagtaccccaacaaccttttgcggggacaacaatccgtggacagtactacacggggactcgtcactgcaactgagtgcacaaacaaaggacgggttgcacatacaacttgtactgcacctataatacacctaaaaggtgatcctaatagtttaaaatgtttaagatatagggtaaaaacacataaaagtttgtatgttcaaatttcatctacctggcattggaccagtaatgaatgtacaaataataaactaggtattgtaacaataacgtacagtgatgaaacacaacgtcaacaatttttaaaaactgttaaaataccaaatactgtgcaagttatacaaggtgtcatgtcattgtgatatttgtacatatgtatatatgtatatgtgtatggtaaacacccaacacaagccaatattgctgctattgtgtatatataacaatgttaggattatttgtattttgttttattttgcttatggtgttttgtgcagtgcttaggccgctcttgctatctatatcggtgtatgcgcaggtgttggtgctggtgcttttgctatgggtatctattgggtcaccatttaaagtgttttttttgtacctactgtttttatattttccaatgttttgtattcactgtcatgcacagtatttggcacaactgcaataactgtacatgtagattggctacatgcatatatgcaaaatatactttttcacttttgtagtttgtctaataaatacttttatattttttaatagcttgtcgcaatgagatacagacggtctacacggcacaaacgtgcttctgcaacacagctatatcaaacatgcaaagcctctggcacctgcccccccgatgttattcctaaagtggaaggcacaactattgcagatcaacttttaaaatatggcagcctaggggtgttttttggaggtttgggtataggtacaggtgcaggctctggtggtagggcaggctatgtgccattgtccactcgtcctcccactagtagtattaccacgtccaccattcgtccccctgtaactgtagaacccattggtcccttagaaccatctatagtttctatgatagaagaaacaacatttattgagtctggcgcacctgctccatctattccatcagcaacagggtttgatgttacaacatctgcaaataatactcctgcaataattaatgtaacatctataggtgaatcatctgtacaatcagtttctacacatttaaatcctacattcactgaaccatctataatacagcccccggcacctgcagaagcatctggtcatgtattgttttctagtccaactattagtacacacacctatgaagaaatccctatggatacatttgttacctctactgacagcagcagtgtaacaagtagtacacctattccagggtctcgccctacgacacgccttggtttatatagccgtgccacacaacaggttaaggtagtcgaccctgcttttatgtcatcaccacagaaattagtaacatataacaatcctgtttttgagggcgttgatacagatgaaactataatttttgatcgttcacaacttttacctgcaccggatcctgattttttagacattatagctttgcataggcctgcattaacctctcgaagaggtactgttaggtttagcaggcttggtaataaggccaccctacgtacacgtagtggaaaacaaattggggcacgggtacattattatcatgatattagtcctatccagcctgctgaagttcaggaagacatagaattgcaacctttattaccacagtctgtgtccccttacactattaatgatggtttgtatgatgtgtatgcagattctttgcagcaacccacgtttcacttaccttccacactttctacccataataatactttcactgtacctattaatagtggtattgactttgtatatcaacccactatgtccattgagtcaggtcctgacattccattaccttcgttacccacacatactccttttgttcctatagcccctacagctccatctacatctattattgttgatggtacagattttattttacatcctagttattttttactacgtcgcaggcgtaaacgttttccatatttttttacagatgtccgtgtggcggcctagtgaggccactgtgtacctgcctcctgtacctgtctctaaggttgtaagcactgatgagtatgtgtctcgcacaagcatctattattatgcaggcagttctcgattactaacagtaggacatccctatttttctattaaaaacaccagtagtggtaatggtaaaaaagttttagttcccaaggtgtctggcctgcaatacagggtatttagaattaaattgccggaccctaataaatttggttttccagatacatctttttataacccagaaacccaaaggttggtgtgggcctgtacaggcttggaaattggtaggggacagcctttaggtgtgggtattagtgggcatcctttattaaacaagtttgatgatactgaaaccagtaacaaatatgctggtaaacctggtatagataatagggaatgtttatctatggattataagcagactcagttatgcattttaggatgcaaacctcctataggtgaacattggggtaagggaaccccttgtaataataattcaggaaatcctggggattgtcctcccctacagctcattaacagtgtaatacaggatggggacatggtagatacaggatttggttgcatggattttaataccttgcaagctagtaaaagtgatgtgcccattgatatatgtagcagtgtatgtaagtatccagattatttgcaaatggctagcgagccatatggtgacagtttgttcttttttcttagacgtgagcaaatgtttgttagacacttttttaatagggccggtaccttaggtgaccctgtgccaggtgatttatatatacaagggtctaactctggcaatactgccactgtacaaagcagtgctttttttcctactcctagtggttctatggtaacctcagaatcccaattatttaataaaccgtactggttacaacgtgcgcagggccacaataatggcatatgttggggcaatcagttgtttgtcacagttgtggataccactcgtagcactaacatgactttatgtgctgaggttaaaaaggaaagcacatataaaaatgaaaattttaaggaataccttcgtcatggcgaggaatttgatttacaatttatttttcaattgtgcaaaattacattaacagctgatgttatgacatacattcataagatggatgccactattttagaggactggcaatttggccttaccccaccaccgtctgcatctttggaggacacatacagatttgtcacttctactgctataacttgtcaaaaaaacacaccacctaaaggaaaggaagatcctttaaaggactatatgttttgggaggtggatttaaaagaaaagttttctgcagatttagatcagtttcctttaggtaggaagtttttgttacaggcagggctacaggctaggcccaaactaaaacgccctgcatcatcggccccacgtacctccacaaagaagaaaaaggttaaaaggtaaccattgtctgttgggtaattgtctgtgtcatgtatgtgttgtgtatgtcaaacacaggttaaaaggtaaccattgtttgttatgtaattgttttgtgtgtgtactgtgttgtttgcatgttatgtatgtgtgtgcatgtttgttgtatttgtcagttcctgtatgtatgttttgtgtatgtattaataaagtactgtatttactaaactatttatagtagtcttatgttatgttatggttgcacccacatgagtaacaatacagttgctcctaatctattgcatctcctgccctaccctgtgtcccctgccctaccctgtgtcctactttgttacactactaattagccttatactctccattttgtaccattttgtactatccaccattttaaatcctaaccgaattcggttggtcttggcacaactttggttgtccttggcacagtaacaactatttttatataagtttcagcaaactgcttaatcctttggtttcctgcagtccactggtctacacttgttgtcccgcctaaactgacttcttgctgactcacaggtcctgcagtgcagctaaacaatacattgcctaacattgcatgttttaaactgcttttaggcacatattttatttaaactttcaatgcactaattacagtgttggcttacacaagtacatcctacgccaaatatgtcttgtaaaacatgattaaatactgttactcaccaggtgtgcactacacgaccggttacggttaccgtacccacaaccacttttttttataatta

SEQ ID NO: 662 - DNA, 7942 bp, Papilloma virus
taaattataatuttatautagtaaaaaatagggtgtaauugaaaauggtuagauugaaauuggtgtatatatatagaauauagtgtagutaauguaugguuatgtttgaggatuuaguaauaugauuuuggauuutguaugaattgtgtgaggtgutggaagaatuggtguatgaaataaggutguagtgtgtguagtguaaaaaagagutauaaugaagagaggtatauaagtttutatttauagatttaugaatagtatatagagauaataatuuatatggugtgtgtattatgtguutaugutttttatutaagataagtgaatatagguattatuaatattuautgtatgggaaaauattagaagagagggtaaaaaaauuattaagtgaaataautattagatgtataatttgtuaaauguuattatgtuutgaagaaaaagaaagauatgttaatguaaauaagugatttuataatattatgggtugttggauagggugutgttuagagtgttggagauuuugauutgtgauuuaagtgtaaugtuatgugtggagauaaaguaautataaaagattatatattagatutguaauutgaaauaautgauutauautgutatgaguaattaggtgauagutuagatgaggaggatauagatggtgtggauugguuagatggauaaguagaauaaguuauaaguaattautauattgtgauatattgtuauagttgtgataguauautauggutatguattuataguautgugauggauuttugtaututauaguaaatgutgttggguauattauaagttgtgtguuuuggutgtguauggutataaauaauuutguaatggaggauuutgaaggtauagagggugaaagggagggatgtauaggutggtttgaagtagagguaataatagaaaaauaaauaggagataauatttuagaggaugaggatgaaaatguatatgatagtggaauagatutaatagattttatagatgattuaaatataaataatgaauagguagaauatgagguaguuuggguattgtttaatguauaggaaggggaggatgatttauatgutgtgtutguagtaaaaugaaagtttauaaguagtuuggaaagtgutggguaagatggtgtagaaaaauatggtagtuugugtguaaaauauatttgtgtaaatauagagtgtgttttauuaaaauguaaauuatgtuaugtagaagauaguggutatgguaatagtgaagtggaaguguaguagatgguagauuaggtagauggguaaaatggugautgguaaagtaauagtagtuaatuaagtggggtgggggutagtaattuagatgtaagttgtautagtatagaggauaatgaggaaaatagtaatagaaugutaaaaaguatauaaaatattatgtgugaaaataguataaaaauaautgtattatttaaatttaaagaaauatatggtgttagutttatggaattagtaagauuatttaaaagtaatagaagtagttgtauagattggtgtattataggaatgggagtaauauuatuagttguagaaggattaaaagtattaatauaguuutataguatatatguuuatttguaatgtttaauatgtgauagaggugtguttatautgutgutaattaggtttaaatgtggaaaaaauagattaauagtgtuuaaautaatgtuauagutgttaaatatauuagaaauauatatggtaatagaauuauuaaaattaugaagtgutauutgtguattatattggtatagaauaggtttgtutaatattagtgaggtatatggtauuauuuuagaatggatagaauaauaaauagtattauaguatagutttgauaataguatattugattttggagaaatggtguaatggguatatgatuatgatataauagatgatagtgauataguatataaatatguauagttaguagatgtaaataguaatgutguaguattuutaaaaaguaattuguaaguaaaaatagtaaaggautgtguaauuatgtgtagauattataaauggguagaaagaaaauatatgaatattggauaatggatauagtatagatgtgatagaatagatgatggtggagattggagguutatagtaagatttttaagatatuaagauatagaatttauaguutttttagauguatttaaaaaatttttaaaaggtatauutaaaaaaaattgtttagtattatatggauutguaaauauaggaaaatuatattttggaatgagtttaattaggttuttaagtggatgtgtaatatuutatgtaaautuaaaaaguuatttttggutauaauuattaauagatguaaaagtgggtatgatagatgatgtaauauutatatgttggauatatatagatgattatatgagaaatguautggatggaaatgatatatuagtagatgtaaaguatagaguuttagtauaaataaaatguuuauuattaattttaauaauaaatauaaatguaggaauagatuutaggtgguuatatttauatagtagattggttgtgtttuatttuaaaaauuuatttuuatttgatgaaaatgguaatuutatatatgaaattaauaaugaaaattggaaatuutttttutuaaggaugtggtguaaattagatttaatauaggaagaggauaaggaaaaugatggagtugatauugguaugtttaaatguagtguaggaaaaaatautagatutataugaagutgatagtaatgauutaaauguauaaattgaauattggaaattgautugaatggaatgtgttttgttttauaaaguaaaggaautgggaataautuatatagguuauuaggtggtguuauuaatgguagtgtutaagguaaagguutguuaagutattgaautauaattgguattggagguattaaauaaaauauaatataguauagatggatggauattauaauaaauaagtutagaaatgtggugtguagaauuauaaaaatautttaaaaaauatgggtatauaataauagtguaataugataatgataaaaauaatautatggattatauaaautggaaggaaatttatttauttggtgagtgtgaatgtauaattgtagaaggauaagtagattautatgggttatattattggtgtgatggagaaaaaatatattttgtaaaatttagtaaugatguaaaguaatattgtgtaauaggagtatgggaagtauatgtgggtggtuaggtaattgtttgtuutguatutgtatutagtaaugaagtatuuautautgaaautgutgtuuauutatguauugaaauutuuaagauutuuguagtgtuugtgggtguuaaagauauauauutauaauuauuauagaaaugaugaugauuagaugtuauagautuuagaaauauuaagtauuuuaauaauuttttguggggauaauaatuugtggauagtautauauggggautugtuautguaautgagtguauaaauaaaggaugggttguauatauaauttgtautguauutataatauauutaaaaggtgatuutaatagtttaaaatgtttaagatatagggtaaaaauauataaaagtttgtatgttuaaatttuatutauutgguattggauuagtaatgaatgtauaaataataaautaggtattgtaauaataaugtauagtgatgaaauauaaugtuaauaatttttaaaaautgttaaaatauuaaatautgtguaagttatauaaggtgtuatgtuattgtgatatttgtauatatgtatatatgtatatgtgtatggtaaauauuuaauauaaguuaatattgutgutattgtgtatatataauaatgttaggattatttgtattttgttttattttguttatggtgttttgtguagtguttagguugututtgutatutatatuggtgtatguguaggtgttggtgutggtguttttgutatgggtatutattgggtuauuatttaaagtgttttttttgtauutautgtttttatattttuuaatgttttgtattuautgtuatguauagtatttgguauaautguaataautgtauatgtagattggutauatguatatatguaaaatatautttttuauttttgtagtttgtutaataaatauttttatattttttaataguttgtuguaatgagatauagauggtutauaugguauaaaugtguttutguaauauagutatatuaaauatguaaaguututgguauutguuuuuuugatgttattuutaaagtggaagguauaautattguagatuaauttttaaaatatgguaguutaggggtgttttttggaggtttgggtataggtauaggtguaggututggtggtaggguaggutatgtguuattgtuuautugtuutuuuautagtagtattauuaugtuuauuattugtuuuuutgtaautgtagaauuuattggtuuuttagaauuatutatagtttutatgatagaagaaauaauatttattgagtutgguguauutgutuuatutattuuatuaguaauagggtttgatgttauaauatutguaaataatautuutguaataattaatgtaauatutataggtgaatuatutgtauaatuagtttutauauatttaaatuutauattuautgaauuatutataatauaguuuuugguauutguagaaguatutggtuatgtattgttttutagtuuaautattagtauauauauutatgaagaaatuuutatggatauatttgttauututautgauaguaguagtgtaauaagtagtauauutattuuagggtutuguuutaugauauguuttggtttatataguugtguuauauaauaggttaaggtagtugauuutguttttatgtuatuauuauagaaattagtaauatataauaatuutgtttttgagggugttgatauagatgaaautataatttttgatugttuauaauttttauutguauuggatuutgattttttagauattatagutttguatagguutguattaauututugaagaggtautgttaggtttaguagguttggtaataagguuauuutaugtauaugtagtggaaaauaaattgggguaugggtauattattatuatgatattagtuutatuuaguutgutgaagttuaggaagauatagaattguaauutttattauuauagtutgtgtuuuuttauautattaatgatggtttgtatgatgtgtatguagattutttguaguaauuuaugtttuauttauuttuuauautttutauuuataataatautttuautgtauutattaatagtggtattgautttgtatatuaauuuautatgtuuattgagtuaggtuutgauattuuattauuttugttauuuauauatautuuttttgttuutataguuuutauagutuuatutauatutattattgttgatggtauagattttattttauatuutagttattttttautaugtuguaggugtaaaugttttuuatatttttttauagatgtuugtgtggugguutagtgagguuautgtgtauutguutuutgtauutgtututaaggttgtaaguautgatgagtatgtgtutuguauaaguatutattattatguagguagttutugattautaauagtaggauatuuutatttttutattaaaaauauuagtagtggtaatggtaaaaaagttttagttuuuaaggtgtutgguutguaatauagggtatttagaattaaattguuggauuutaataaatttggttttuuagatauatutttttataauuuagaaauuuaaaggttggtgtggguutgtauagguttggaaattggtaggggauaguutttaggtgtgggtattagtggguatuutttattaaauaagtttgatgatautgaaauuagtaauaaatatgutggtaaauutggtatagataatagggaatgtttatutatggattataaguagautuagttatguattttaggatguaaauutuutataggtgaauattggggtaagggaauuuuttgtaataataattuaggaaatuutggggattgtuutuuuutauagutuattaauagtgtaatauaggatggggauatggtagatauaggatttggttguatggattttaatauuttguaagutagtaaaagtgatgtguuuattgatatatgtaguagtgtatgtaagtatuuagattatttguaaatggutagugaguuatatggtgauagtttgttuttttttuttagaugtgaguaaatgtttgttagauauttttttaataggguuggtauuttaggtgauuutgtguuaggtgatttatatatauaagggtutaaututgguaatautguuautgtauaaaguagtgutttttttuutautuutagtggttutatggtaauutuagaatuuuaattatttaataaauugtautggttauaaugtguguaggguuauaataatgguatatgttgggguaatuagttgtttgtuauagttgtggatauuautugtaguautaauatgautttatgtgutgaggttaaaaaggaaaguauatataaaaatgaaaattttaaggaatauuttugtuatggugaggaatttgatttauaatttatttttuaattgtguaaaattauattaauagutgatgttatgauatauattuataagatggatguuautattttagaggautgguaatttgguuttauuuuauuauugtutguatutttggaggauauatauagatttgtuauttutautgutataauttgtuaaaaaaauauauuauutaaaggaaaggaagatuutttaaaggautatatgttttgggaggtggatttaaaagaaaagttttutguagatttagatuagtttuutttaggtaggaagtttttgttauagguagggutauaggutagguuuaaautaaaauguuutguatuatugguuuuaugtauutuuauaaagaagaaaaaggttaaaaggtaauuattgtutgttgggtaattgtutgtgtuatgtatgtgttgtgtatgtuaaauauaggttaaaaggtaauuattgtttgttatgtaattgttttgtgtgtgtautgtgttgtttguatgttatgtatgtgtgtguatgtttgttgtatttgtuagttuutgtatgtatgttttgtgtatgtattaataaagtautgtatttautaaautatttatagtagtuttatgttatgttatggttguauuuauatgagtaauaatauagttgutuutaatutattguatutuutguuutauuutgtgtuuuutguuutauuutgtgtuutautttgttauautautaattaguuttataututuuattttgtauuattttgtautatuuauuattttaaatuutaauugaattuggttggtuttgguauaautttggttgtuuttgguauagtaauaautatttttatataagtttuaguaaautguttaatuutttggtttuutguagtuuautggtutauauttgttgtuuuguutaaautgauttuttgutgautuauaggtuutguagtguagutaaauaatauattguutaauattguatgttttaaautguttttagguauatattttatttaaautttuaatguautaattauagtgttgguttauauaagtauatuutauguuaaatatgtuttgtaaaauatgattaaatautgttautuauuaggtgtguautauaugauuggttauggttauugtauuuauaauuauttttttttataatta

SEQ ID NO: 663 - DNA, 7942 bp, Papilloma virus
taaattataattttatattagtaaaaaatagggtgtaattgaaaatggttagattgaaattggtgtatatatatagaatatagtgtagttaatgtatggttatgtttgaggatttagtaatatgattttggattttgtatgaattgtgtgaggtgttggaagaattggtgtatgaaataaggttgtagtgtgtgtagtgtaaaaaagagttataatgaagagaggtatataagtttttatttatagatttatgaatagtatatagagataataatttatatggtgtgtgtattatgtgtttatgttttttatttaagataagtgaatataggtattattaatatttattgtatgggaaaatattagaagagagggtaaaaaaattattaagtgaaataattattagatgtataatttgttaaatgttattatgttttgaagaaaaagaaagatatgttaatgtaaataagtgattttataatattatgggttgttggatagggtgttgtttagagtgttggagattttgatttgtgatttaagtgtaatgttatgtgtggagataaagtaattataaaagattatatattagatttgtaatttgaaataattgatttatattgttatgagtaattaggtgatagtttagatgaggaggatatagatggtgtggattggttagatggataagtagaataagttataagtaattattatattgtgatatattgttatagttgtgatagtatattatggttatgtatttatagtattgtgatggatttttgtattttatagtaaatgttgttgggtatattataagttgtgtgttttggttgtgtatggttataaataattttgtaatggaggattttgaaggtatagagggtgaaagggagggatgtataggttggtttgaagtagaggtaataatagaaaaataaataggagataatattttagaggatgaggatgaaaatgtatatgatagtggaatagatttaatagattttatagatgatttaaatataaataatgaataggtagaatatgaggtagtttgggtattgtttaatgtataggaaggggaggatgatttatatgttgtgtttgtagtaaaatgaaagtttataagtagtttggaaagtgttgggtaagatggtgtagaaaaatatggtagtttgtgtgtaaaatatatttgtgtaaatatagagtgtgttttattaaaatgtaaattatgttatgtagaagatagtggttatggtaatagtgaagtggaagtgtagtagatggtagattaggtagatgggtaaaatggtgattggtaaagtaatagtagttaattaagtggggtgggggttagtaatttagatgtaagttgtattagtatagaggataatgaggaaaatagtaatagaatgttaaaaagtatataaaatattatgtgtgaaaatagtataaaaataattgtattatttaaatttaaagaaatatatggtgttagttttatggaattagtaagattatttaaaagtaatagaagtagttgtatagattggtgtattataggaatgggagtaatattattagttgtagaaggattaaaagtattaatatagttttatagtatatatgtttatttgtaatgtttaatatgtgatagaggtgtgtttatattgttgttaattaggtttaaatgtggaaaaaatagattaatagtgtttaaattaatgttatagttgttaaatatattagaaatatatatggtaatagaattattaaaattatgaagtgttatttgtgtattatattggtatagaataggtttgtttaatattagtgaggtatatggtattattttagaatggatagaataataaatagtattatagtatagttttgataatagtatatttgattttggagaaatggtgtaatgggtatatgattatgatataatagatgatagtgatatagtatataaatatgtatagttagtagatgtaaatagtaatgttgtagtatttttaaaaagtaatttgtaagtaaaaatagtaaaggattgtgtaattatgtgtagatattataaatgggtagaaagaaaatatatgaatattggataatggatatagtatagatgtgatagaatagatgatggtggagattggaggtttatagtaagatttttaagatattaagatatagaatttatagtttttttagatgtatttaaaaaatttttaaaaggtatatttaaaaaaaattgtttagtattatatggatttgtaaatataggaaaattatattttggaatgagtttaattaggtttttaagtggatgtgtaatattttatgtaaatttaaaaagttatttttggttataattattaatagatgtaaaagtgggtatgatagatgatgtaatatttatatgttggatatatatagatgattatatgagaaatgtattggatggaaatgatatattagtagatgtaaagtatagagttttagtataaataaaatgtttattattaattttaataataaatataaatgtaggaatagattttaggtggttatatttatatagtagattggttgtgttttattttaaaaatttatttttatttgatgaaaatggtaattttatatatgaaattaataatgaaaattggaaatttttttttttaaggatgtggtgtaaattagatttaatataggaagaggataaggaaaatgatggagttgatattggtatgtttaaatgtagtgtaggaaaaaatattagatttatatgaagttgatagtaatgatttaaatgtataaattgaatattggaaattgatttgaatggaatgtgttttgttttataaagtaaaggaattgggaataatttatataggttattaggtggtgttattaatggtagtgtttaaggtaaaggtttgttaagttattgaattataattggtattggaggtattaaataaaatataatatagtatagatggatggatattataataaataagtttagaaatgtggtgtgtagaattataaaaatattttaaaaaatatgggtatataataatagtgtaatatgataatgataaaaataatattatggattatataaattggaaggaaatttatttatttggtgagtgtgaatgtataattgtagaaggataagtagattattatgggttatattattggtgtgatggagaaaaaatatattttgtaaaatttagtaatgatgtaaagtaatattgtgtaataggagtatgggaagtatatgtgggtggttaggtaattgtttgttttgtatttgtatttagtaatgaagtatttattattgaaattgttgtttatttatgtattgaaatttttaagatttttgtagtgtttgtgggtgttaaagatatatatttataattattatagaaatgatgatgattagatgttatagattttagaaatattaagtattttaataattttttgtggggataataatttgtggatagtattatatggggatttgttattgtaattgagtgtataaataaaggatgggttgtatatataatttgtattgtatttataatatatttaaaaggtgattttaatagtttaaaatgtttaagatatagggtaaaaatatataaaagtttgtatgtttaaattttatttatttggtattggattagtaatgaatgtataaataataaattaggtattgtaataataatgtatagtgatgaaatataatgttaataatttttaaaaattgttaaaatattaaatattgtgtaagttatataaggtgttatgttattgtgatatttgtatatatgtatatatgtatatgtgtatggtaaatatttaatataagttaatattgttgttattgtgtatatataataatgttaggattatttgtattttgttttattttgtttatggtgttttgtgtagtgtttaggttgtttttgttatttatattggtgtatgtgtaggtgttggtgttggtgtttttgttatgggtatttattgggttattatttaaagtgttttttttgtatttattgtttttatattttttaatgttttgtatttattgttatgtatagtatttggtataattgtaataattgtatatgtagattggttatatgtatatatgtaaaatatatttttttatttttgtagtttgtttaataaatatttttatattttttaatagtttgttgtaatgagatatagatggtttatatggtataaatgtgtttttgtaatatagttatattaaatatgtaaagtttttggtatttgtttttttgatgttatttttaaagtggaaggtataattattgtagattaatttttaaaatatggtagtttaggggtgttttttggaggtttgggtataggtataggtgtaggttttggtggtagggtaggttatgtgttattgtttatttgtttttttattagtagtattattatgtttattatttgtttttttgtaattgtagaatttattggttttttagaattatttatagtttttatgatagaagaaataatatttattgagtttggtgtatttgttttatttattttattagtaatagggtttgatgttataatatttgtaaataatatttttgtaataattaatgtaatatttataggtgaattatttgtataattagtttttatatatttaaattttatatttattgaattatttataatatagtttttggtatttgtagaagtatttggttatgtattgttttttagtttaattattagtatatatatttatgaagaaatttttatggatatatttgttatttttattgatagtagtagtgtaataagtagtatatttattttagggttttgttttatgatatgttttggtttatatagttgtgttatataataggttaaggtagttgattttgtttttatgttattattatagaaattagtaatatataataattttgtttttgagggtgttgatatagatgaaattataatttttgattgtttataatttttatttgtattggattttgattttttagatattatagttttgtataggtttgtattaattttttgaagaggtattgttaggtttagtaggtttggtaataaggttattttatgtatatgtagtggaaaataaattggggtatgggtatattattattatgatattagttttatttagtttgttgaagtttaggaagatatagaattgtaatttttattattatagtttgtgtttttttatattattaatgatggtttgtatgatgtgtatgtagattttttgtagtaatttatgttttatttattttttatattttttatttataataatatttttattgtatttattaatagtggtattgattttgtatattaatttattatgtttattgagttaggttttgatattttattatttttgttatttatatatattttttttgtttttatagtttttatagttttatttatatttattattgttgatggtatagattttattttatattttagttattttttattatgttgtaggtgtaaatgttttttatatttttttatagatgtttgtgtggtggtttagtgaggttattgtgtatttgttttttgtatttgtttttaaggttgtaagtattgatgagtatgtgttttgtataagtatttattattatgtaggtagtttttgattattaatagtaggatatttttatttttttattaaaaatattagtagtggtaatggtaaaaaagttttagtttttaaggtgtttggtttgtaatatagggtatttagaattaaattgttggattttaataaatttggttttttagatatatttttttataatttagaaatttaaaggttggtgtgggtttgtataggtttggaaattggtaggggatagtttttaggtgtgggtattagtgggtattttttattaaataagtttgatgatattgaaattagtaataaatatgttggtaaatttggtatagataatagggaatgtttatttatggattataagtagatttagttatgtattttaggatgtaaattttttataggtgaatattggggtaagggaattttttgtaataataatttaggaaattttggggattgtttttttttatagtttattaatagtgtaatataggatggggatatggtagatataggatttggttgtatggattttaatattttgtaagttagtaaaagtgatgtgtttattgatatatgtagtagtgtatgtaagtatttagattatttgtaaatggttagtgagttatatggtgatagtttgttttttttttttagatgtgagtaaatgtttgttagatatttttttaatagggttggtattttaggtgattttgtgttaggtgatttatatatataagggtttaattttggtaatattgttattgtataaagtagtgtttttttttttatttttagtggttttatggtaattttagaattttaattatttaataaattgtattggttataatgtgtgtagggttataataatggtatatgttggggtaattagttgtttgttatagttgtggatattatttgtagtattaatatgattttatgtgttgaggttaaaaaggaaagtatatataaaaatgaaaattttaaggaatatttttgttatggtgaggaatttgatttataatttattttttaattgtgtaaaattatattaatagttgatgttatgatatatatttataagatggatgttattattttagaggattggtaatttggttttattttattattgtttgtatttttggaggatatatatagatttgttatttttattgttataatttgttaaaaaaatatattatttaaaggaaaggaagattttttaaaggattatatgttttgggaggtggatttaaaagaaaagttttttgtagatttagattagttttttttaggtaggaagtttttgttataggtagggttataggttaggtttaaattaaaatgttttgtattattggttttatgtatttttataaagaagaaaaaggttaaaaggtaattattgtttgttgggtaattgtttgtgttatgtatgtgttgtgtatgttaaatataggttaaaaggtaattattgtttgttatgtaattgttttgtgtgtgtattgtgttgtttgtatgttatgtatgtgtgtgtatgtttgttgtatttgttagtttttgtatgtatgttttgtgtatgtattaataaagtattgtatttattaaattatttatagtagttttatgttatgttatggttgtatttatatgagtaataatatagttgtttttaatttattgtattttttgttttattttgtgttttttgttttattttgtgttttattttgttatattattaattagttttatattttttattttgtattattttgtattatttattattttaaattttaattgaatttggttggttttggtataattttggttgtttttggtatagtaataattatttttatataagttttagtaaattgtttaattttttggttttttgtagtttattggtttatatttgttgttttgtttaaattgattttttgttgatttataggttttgtagtgtagttaaataatatattgtttaatattgtatgttttaaattgtttttaggtatatattttatttaaatttttaatgtattaattatagtgttggtttatataagtatattttatgttaaatatgttttgtaaaatatgattaaatattgttatttattaggtgtgtattatatgattggttatggttattgtatttataattatttttttttataatta

SEQ ID NO: 664 - DNA, 7942 bp, Papilloma virus
atttaatattagaatatgatcattttttatcccacattggcttttgccagtctggctttggccacatatatatatcttgtgtcacatcgattgcgtgccggtacaaactcctaggtcgttgtgctggggcctgggacgtgcttaacacactccacgaccttcttagccacgtactttattccgacgtcacacacgtcacgttttttctcgatgttgcttctctccatatgttcaaagataaatgtctaaatgcttatcatatatctctgttattaggtataccgcacacataatacacggatgcgaaaaatagattctattcacttatatccgtaatagttataagtgacatacccttttgtaatcttctctcccatttttttggtaattcactttattgataatctacatattaaacagtttgcggtaatacaggacttctttttctttctgtacaattacgtttgttcgctaaagtattataatacccagcaacctgtcccgcgacaagtctcacaacctctggggctggacactgggttcacattgcagtacgcacctctgtttcgttgatattttctaatatataatctagacgttggactttgttgactggatgtgacgatactcgttaatccactgtcgagtctactcctcctatgtctaccacacctggccggtctacctgttcgtcttgttcggtgttcgttaatgatgtaacactgtataacagtgtcaacactatcgtgtgatgccgatacgtaagtatcgtgacgctgcctggaagcatgagatgtcgtttacgacaacccgtgtaatgttcaacacacggggccgacacgtgccgatatttgttgggacgttacctcctgggacttccatgtctcccgctttccctccctacatgtccgaccaaacttcatctccgttattatctttttgtttgtcctctattgtaaagtctcctgctcctacttttacgtatactatcaccttgtctagattatctaaaatatctactaagtttatatttattacttgtccgtcttgtactccgtcgggcccgtaacaaattacgtgtccttcccctcctactaaatgtacgacacagacgtcattttgctttcaaatgttcgtcaggcctttcacgacccgttctaccacatctttttgtaccatcaggcgcacgttttgtgtaaacacatttatgtctcacacaaaatggttttgcgtttggtacagtgcatcttctgtcgccgataccgttatcacttcaccttcgcgtcgtctaccgtctggtccatctgcccgttttaccgctgaccgtttcattgtcatcagttagttcaccccacccccgatcattaagtctacattcaacatgatcatatctcctgttactccttttatcattatcttgcgatttttcgtatgttttataatacacgcttttatcgtatttttgttgacataataaatttaaatttctttgtataccacaatcgaaataccttaatcattctggtaaattttcattatcttcatcaacatgtctaaccacataatatccttaccctcattgtggtagtcaacgtcttcctaattttcataattatgtcgggatatcgtatatacgggtaaacgttacaaattgtacactgtctccgcacgaatatgacgacgattaatccaaatttacaccttttttgtctaattgtcacaggtttgattacagtgtcgacaatttatatggtctttgtgtataccattatcttggtggttttaatgcttcacgatggacacgtaatataaccatatcttgtccaaacagattataatcactccatataccatggtggggtcttacctatcttgttgtttgtcataatgtcgtatcgaaactgttatcgtataagctaaaacctctttaccacgttacccgtatactagtactatattgtctactatcactgtatcgtatatttatacgtgtcaatcgtctacatttatcgttacgacgtcgtaaggatttttcgttaagcgttcgtttttatcatttcctgacacgttggtacacatctgtaatatttgcccgtctttcttttgtatacttataacctgttacctatgtcatatctacactatcttatctactaccacctctaacctccggatatcattctaaaaattctatagttctgtatcttaaatgtcggaaaaatctgcgtaaattttttaaaaattttccatatggattttttttaacaaatcataatatacctggacgtttgtgtccttttagtataaaaccttactcaaattaatccaagaattcacctacacattataggatacatttgagtttttcggtaaaaaccgatgttggtaattgtctacgttttcacccatactatctactacattgtggatatacaacctgtatatatctactaatatactctttacgtgacctacctttactatatagtcatctacatttcgtatctcggaatcatgtttattttacgggtggtaattaaaattgttgtttatgtttacgtccttgtctaggatccaccggtataaatgtatcatctaaccaacacaaagtaaagtttttgggtaaaggtaaactacttttaccgttaggatatatactttaattgttgcttttaacctttaggaaaaagagttcctgcaccacgtttaatctaaattatgtccttctcctgttccttttgctacctcagctatggccgtgcaaatttacgtcacgtccttttttatgatctagatatgcttcgactatcattactggatttgcgtgtttaacttgtaacctttaactgagcttaccttacacaaaacaaaatgtttcgtttccttgacccttattgagtatatccggtggtccaccacggtggttaccgtcacagattccgtttccggacggttcgataacttgatgttaaccgtaacctccgtaatttgttttgtgttatatcgtgtctacctacctgtaatgttgtttgttcagatctttacaccgcacgtcttggtgtttttatgaaattttttgtacccatatgttattgtcacgttatgctattactatttttgttatgatacctaatatgtttgaccttcctttaaataaatgaaccactcacacttacatgttaacatcttcctgttcatctaatgatacccaatataataaccacactacctcttttttatataaaacattttaaatcattgctacgtttcgttataacacattgtcctcatacccttcatgtacacccaccagtccattaacaaacaggacgtagacatagatcattgcttcataggtgatgactttgacgacaggtggatacgtggctttggaggttctggaggcgtcacaggcacccacggtttctgtgtgtggatgttggtggtgtctttgctgctgctggtctgcagtgtctgaggtctttgtggttcatggggttgttggaaaacgcccctgttgttaggcacctgtcatgatgtgcccctgagcagtgacgttgactcacgtgtttgtttcctgcccaacgtgtatgttgaacatgacgtggatattatgtggattttccactaggattatcaaattttacaaattctatatcccatttttgtgtattttcaaacatacaagtttaaagtagatggaccgtaacctggtcattacttacatgtttattatttgatccataacattgttattgcatgtcactactttgtgttgcagttgttaaaaatttttgacaattttatggtttatgacacgttcaatatgttccacagtacagtaacactataaacatgtatacatatatacatatacacataccatttgtgggttgtgttcggttataacgacgataacacatatatattgttacaatcctaataaacataaaacaaaataaaacgaataccacaaaacacgtcacgaatccggcgagaacgatagatatagccacatacgcgtccacaaccacgaccacgaaaacgatacccatagataacccagtggtaaatttcacaaaaaaaacatggatgacaaaaatataaaaggttacaaaacataagtgacagtacgtgtcataaaccgtgttgacgttattgacatgtacatctaaccgatgtacgtatatacgttttatatgaaaaagtgaaaacatcaaacagattatttatgaaaatataaaaaattatcgaacagcgttactctatgtctgccagatgtgccgtgtttgcacgaagacgttgtgtcgatatagtttgtacgtttcggagaccgtggacgggggggctacaataaggatttcaccttccgtgttgataacgtctagttgaaaattttataccgtcggatccccacaaaaaacctccaaacccatatccatgtccacgtccgagaccaccatcccgtccgatacacggtaacaggtgagcaggagggtgatcatcataatggtgcaggtggtaagcagggggacattgacatcttgggtaaccagggaatcttggtagatatcaaagatactatcttctttgttgtaaataactcagaccgcgtggacgaggtagataaggtagtcgttgtcccaaactacaatgttgtagacgtttattatgaggacgttattaattacattgtagatatccacttagtagacatgttagtcaaagatgtgtaaatttaggatgtaagtgacttggtagatattatgtcgggggccgtggacgtcttcgtagaccagtacataacaaaagatcaggttgataatcatgtgtgtggatacttctttagggatacctatgtaaacaatggagatgactgtcgtcgtcacattgttcatcatgtggataaggtcccagagcgggatgctgtgcggaaccaaatatatcggcacggtgtgttgtccaattccatcagctgggacgaaaatacagtagtggtgtctttaatcattgtatattgttaggacaaaaactcccgcaactatgtctactttgatattaaaaactagcaagtgttgaaaatggacgtggcctaggactaaaaaatctgtaatatcgaaacgtatccggacgtaattggagagcttctccatgacaatccaaatcgtccgaaccattattccggtgggatgcatgtgcatcaccttttgtttaaccccgtgcccatgtaataatagtactataatcaggataggtcggacgacttcaagtccttctgtatcttaacgttggaaataatggtgtcagacacaggggaatgtgataattactaccaaacatactacacatacgtctaagaaacgtcgttgggtgcaaagtgaatggaaggtgtgaaagatgggtattattatgaaagtgacatggataattatcaccataactgaaacatatagttgggtgatacaggtaactcagtccaggactgtaaggtaatggaagcaatgggtgtgtatgaggaaaacaaggatatcggggatgtcgaggtagatgtagataataacaactaccatgtctaaaataaaatgtaggatcaataaaaaatgatgcagcgtccgcatttgcaaaaggtataaaaaaatgtctacaggcacaccgccggatcactccggtgacacatggacggaggacatggacagagattccaacattcgtgactactcatacacagagcgtgttcgtagataataatacgtccgtcaagagctaatgattgtcatcctgtagggataaaaagataatttttgtggtcatcaccattaccattttttcaaaatcaagggttccacagaccggacgttatgtcccataaatcttaatttaacggcctgggattatttaaaccaaaaggtctatgtagaaaaatattgggtctttgggtttccaaccacacccggacatgtccgaacctttaaccatcccctgtcggaaatccacacccataatcacccgtaggaaataatttgttcaaactactatgactttggtcattgtttatacgaccatttggaccatatctattatcccttacaaatagatacctaatattcgtctgagtcaatacgtaaaatcctacgtttggaggatatccacttgtaaccccattcccttggggaacattattattaagtcctttaggacccctaacaggaggggatgtcgagtaattgtcacattatgtcctacccctgtaccatctatgtcctaaaccaacgtacctaaaattatggaacgttcgatcattttcactacacgggtaactatatacatcgtcacatacattcataggtctaataaacgtttaccgatcgctcggtataccactgtcaaacaagaaaaaagaatctgcactcgtttacaaacaatctgtgaaaaaattatcccggccatggaatccactgggacacggtccactaaatatatatgttcccagattgagaccgttatgacggtgacatgtttcgtcacgaaaaaaaggatgaggatcaccaagataccattggagtcttagggttaataaattatttggcatgaccaatgttgcacgcgtcccggtgttattaccgtatacaaccccgttagtcaacaaacagtgtcaacacctatggtgagcatcgtgattgtactgaaatacacgactccaatttttcctttcgtgtatatttttacttttaaaattccttatggaagcagtaccgctccttaaactaaatgttaaataaaaagttaacacgttttaatgtaattgtcgactacaatactgtatgtaagtattctacctacggtgataaaatctcctgaccgttaaaccggaatggggtggtggcagacgtagaaacctcctgtgtatgtctaaacagtgaagatgacgatattgaacagtttttttgtgtggtggatttcctttccttctaggaaatttcctgatatacaaaaccctccacctaaattttcttttcaaaagacgtctaaatctagtcaaaggaaatccatccttcaaaaacaatgtccgtcccgatgtccgatccgggtttgattttgcgggacgtagtagccggggtgcatggaggtgtttcttctttttccaattttccattggtaacagacaacccattaacagacacagtacatacacaacacatacagtttgtgtccaattttccattggtaacaaacaatacattaacaaaacacacacatgacacaacaaacgtacaatacatacacacacgtacaaacaacataaacagtcaaggacatacatacaaaacacatacataattatttcatgacataaatgatttgataaatatcatcagaatacaatacaataccaacgtgggtgtactcattgttatgtcaacgaggattagataacgtagaggacgggatgggacacaggggacgggatgggacacaggatgaaacaatgtgatgattaatcggaatatgagaggtaaaacatggtaaaacatgataggtggtaaaatttaggattggcttaagccaaccagaaccgtgttgaaaccaacaggaaccgtgtcattgttgataaaaatatattcaaagtcgtttgacgaattaggaaaccaaaggacgtcaggtgaccagatgtgaacaacagggcggatttgactgaagaacgactgagtgtccaggacgtcacgtcgatttgttatgtaacggattgtaacgtacaaaatttgacgaaaatccgtgtataaaataaatttgaaagttacgtgattaatgtcacaaccgaatgtgttcatgtaggatgcggtttatacagaacattttgtactaatttatgacaatgagtggtccacacgtgatgtgctggccaatgccaatggcatgggtgttggtgaaaaaaaatattaat

SEQ ID NO: 665 - DNA, 7942 bp, Papilloma virus
atttaatattagaatatgatuattttttatuuuauattgguttttguuagtutggutttgguuauatatatatatuttgtgtuauatugattgugtguuggtauaaautuutaggtugttgtgutgggguutgggaugtguttaauauautuuaugauuttuttaguuaugtautttattuugaugtuauauaugtuaugttttttutugatgttguttututuuatatgttuaaagataaatgtutaaatguttatuatatatututgttattaggtatauuguauauataatauauggatgugaaaaatagattutattuauttatatuugtaatagttataagtgauatauuuttttgtaatuttututuuuatttttttggtaattuautttattgataatutauatattaaauagtttguggtaatauaggauttutttttutttutgtauaattaugtttgttugutaaagtattataatauuuaguaauutgtuuugugauaagtutuauaauututggggutggauautgggttuauattguagtauguauututgtttugttgatattttutaatatataatutagaugttggautttgttgautggatgtgaugatautugttaatuuautgtugagtutautuutuutatgtutauuauauutgguuggtutauutgttugtuttgttuggtgttugttaatgatgtaauautgtataauagtgtuaauautatugtgtgatguugataugtaagtatugtgaugutguutggaaguatgagatgtugtttaugauaauuugtgtaatgttuaauauaugggguugauaugtguugatatttgttgggaugttauutuutgggauttuuatgtutuuugutttuuutuuutauatgtuugauuaaauttuatutuugttattatutttttgtttgtuututattgtaaagtutuutgutuutauttttaugtatautatuauuttgtutagattatutaaaatatutautaagtttatatttattauttgtuugtuttgtautuugtuggguuugtaauaaattaugtgtuuttuuuutuutautaaatgtaugauauagaugtuattttgutttuaaatgttugtuagguutttuaugauuugttutauuauatutttttgtauuatuagguguaugttttgtgtaaauauatttatgtutuauauaaaatggttttgugtttggtauagtguatuttutgtuguugatauugttatuauttuauuttugugtugtutauugtutggtuuatutguuugttttauugutgauugtttuattgtuatuagttagttuauuuuauuuuugatuattaagtutauattuaauatgatuatatutuutgttautuuttttatuattatuttgugatttttugtatgttttataatauauguttttatugtatttttgttgauataataaatttaaatttutttgtatauuauaatugaaatauuttaatuattutggtaaattttuattatuttuatuaauatgtutaauuauataatatuuttauuutuattgtggtagtuaaugtuttuutaattttuataattatgtugggatatugtatataugggtaaaugttauaaattgtauautgtutuuguaugaatatgaugaugattaatuuaaatttauauuttttttgtutaattgtuauaggtttgattauagtgtugauaatttatatggtutttgtgtatauuattatuttggtggttttaatguttuaugatggauaugtaatataauuatatuttgtuuaaauagattataatuautuuatatauuatggtggggtuttauutatuttgttgtttgtuataatgtugtatugaaautgttatugtataagutaaaauututttauuaugttauuugtatautagtautatattgtutautatuautgtatugtatatttataugtgtuaatugtutauatttatugttaugaugtugtaaggatttttugttaagugttugtttttatuatttuutgauaugttggtauauatutgtaatatttguuugtutttuttttgtatauttataauutgttauutatgtuatatutauautatuttatutautauuauututaauutuuggatatuattutaaaaattutatagttutgtatuttaaatgtuggaaaaatutgugtaaattttttaaaaattttuuatatggattttttttaauaaatuataatatauutggaugtttgtgtuuttttagtataaaauuttautuaaattaatuuaagaattuauutauauattataggatauatttgagtttttuggtaaaaauugatgttggtaattgtutaugttttuauuuatautatutautauattgtggatatauaauutgtatatatutautaatataututttaugtgauutauutttautatatagtuatutauatttugtatutuggaatuatgtttattttaugggtggtaattaaaattgttgtttatgtttaugtuuttgtutaggatuuauuggtataaatgtatuatutaauuaauauaaagtaaagtttttgggtaaaggtaaautauttttauugttaggatatatautttaattgttguttttaauutttaggaaaaagagttuutguauuaugtttaatutaaattatgtuuttutuutgttuuttttgutauutuagutatgguugtguaaatttaugtuaugtuuttttttatgatutagatatguttugautatuattautggatttgugtgtttaauttgtaauutttaautgaguttauuttauauaaaauaaaatgtttugtttuuttgauuuttattgagtatatuuggtggtuuauuauggtggttauugtuauagattuugtttuuggauggttugataauttgatgttaauugtaauutuugtaatttgttttgtgttatatugtgtutauutauutgtaatgttgtttgttuagatutttauauuguaugtuttggtgtttttatgaaattttttgtauuuatatgttattgtuaugttatgutattautatttttgttatgatauutaatatgtttgauuttuutttaaataaatgaauuautuauauttauatgttaauatuttuutgttuatutaatgatauuuaatataataauuauautauututtttttatataaaauattttaaatuattgutaugtttugttataauauattgtuutuatauuuttuatgtauauuuauuagtuuattaauaaauaggaugtagauatagatuattguttuataggtgatgautttgaugauaggtggataugtggutttggaggttutggaggugtuauagguauuuauggtttutgtgtgtggatgttggtggtgtutttgutgutgutggtutguagtgtutgaggtutttgtggttuatggggttgttggaaaauguuuutgttgttagguauutgtuatgatgtguuuutgaguagtgaugttgautuaugtgtttgtttuutguuuaaugtgtatgttgaauatgaugtggatattatgtggattttuuautaggattatuaaattttauaaattutatatuuuatttttgtgtattttuaaauatauaagtttaaagtagatggauugtaauutggtuattauttauatgtttattatttgatuuataauattgttattguatgtuautautttgtgttguagttgttaaaaatttttgauaattttatggtttatgauaugttuaatatgttuuauagtauagtaauautataaauatgtatauatatatauatatauauatauuatttgtgggttgtgttuggttataaugaugataauauatatatattgttauaatuutaataaauataaaauaaaataaaaugaatauuauaaaauaugtuaugaatuuggugagaaugatagatataguuauataugugtuuauaauuaugauuaugaaaaugatauuuatagataauuuagtggtaaatttuauaaaaaaaauatggatgauaaaaatataaaaggttauaaaauataagtgauagtaugtgtuataaauugtgttgaugttattgauatgtauatutaauugatgtaugtatataugttttatatgaaaaagtgaaaauatuaaauagattatttatgaaaatataaaaaattatugaauagugttaututatgtutguuagatgtguugtgtttguaugaagaugttgtgtugatatagtttgtaugtttuggagauugtggaugggggggutauaataaggatttuauuttuugtgttgataaugtutagttgaaaattttatauugtuggatuuuuauaaaaaauutuuaaauuuatatuuatgtuuaugtuugagauuauuatuuugtuugatauauggtaauaggtgaguaggagggtgatuatuataatggtguaggtggtaaguagggggauattgauatuttgggtaauuagggaatuttggtagatatuaaagatautatuttutttgttgtaaataautuagauugugtggaugaggtagataaggtagtugttgtuuuaaautauaatgttgtagaugtttattatgaggaugttattaattauattgtagatatuuauttagtagauatgttagtuaaagatgtgtaaatttaggatgtaagtgauttggtagatattatgtuggggguugtggaugtuttugtagauuagtauataauaaaagatuaggttgataatuatgtgtgtggatauttutttagggatauutatgtaaauaatggagatgautgtugtugtuauattgttuatuatgtggataaggtuuuagagugggatgutgtguggaauuaaatatatugguauggtgtgttgtuuaattuuatuagutgggaugaaaatauagtagtggtgtutttaatuattgtatattgttaggauaaaaautuuuguaautatgtutautttgatattaaaaautaguaagtgttgaaaatggaugtgguutaggautaaaaaatutgtaatatugaaaugtatuuggaugtaattggagaguttutuuatgauaatuuaaatugtuugaauuattattuuggtgggatguatgtguatuauuttttgtttaauuuugtguuuatgtaataatagtautataatuaggataggtuggaugauttuaagtuuttutgtatuttaaugttggaaataatggtgtuagauauaggggaatgtgataattautauuaaauatautauauataugtutaagaaaugtugttgggtguaaagtgaatggaaggtgtgaaagatgggtattattatgaaagtgauatggataattatuauuataautgaaauatatagttgggtgatauaggtaautuagtuuaggautgtaaggtaatggaaguaatgggtgtgtatgaggaaaauaaggatatuggggatgtugaggtagatgtagataataauaautauuatgtutaaaataaaatgtaggatuaataaaaaatgatguagugtuuguatttguaaaaggtataaaaaaatgtutauagguauauuguuggatuautuuggtgauauatggauggaggauatggauagagattuuaauattugtgautautuatauauagagugtgttugtagataataataugtuugtuaagagutaatgattgtuatuutgtagggataaaaagataatttttgtggtuatuauuattauuattttttuaaaatuaagggttuuauagauuggaugttatgtuuuataaatuttaatttaaugguutgggattatttaaauuaaaaggtutatgtagaaaaatattgggtutttgggtttuuaauuauauuuggauatgtuugaauutttaauuatuuuutgtuggaaatuuauauuuataatuauuugtaggaaataatttgttuaaautautatgautttggtuattgtttataugauuatttggauuatatutattatuuuttauaaatagatauutaatattugtutgagtuaataugtaaaatuutaugtttggaggatatuuauttgtaauuuuattuuuttggggaauattattattaagtuutttaggauuuutaauaggaggggatgtugagtaattgtuauattatgtuutauuuutgtauuatutatgtuutaaauuaaugtauutaaaattatggaaugttugatuattttuautauaugggtaautatatauatugtuauatauattuataggtutaataaaugtttauugatugutuggtatauuautgtuaaauaagaaaaaagaatutguautugtttauaaauaatutgtgaaaaaattatuuugguuatggaatuuautgggauauggtuuautaaatatatatgttuuuagattgagauugttatgauggtgauatgtttugtuaugaaaaaaaggatgaggatuauuaagatauuattggagtuttagggttaataaattatttgguatgauuaatgttguaugugtuuuggtgttattauugtatauaauuuugttagtuaauaaauagtgtuaauauutatggtgaguatugtgattgtautgaaatauaugautuuaatttttuutttugtgtatatttttauttttaaaattuuttatggaaguagtauugutuuttaaautaaatgttaaataaaaagttaauaugttttaatgtaattgtugautauaatautgtatgtaagtattutauutauggtgataaaatutuutgauugttaaauuggaatggggtggtgguagaugtagaaauutuutgtgtatgtutaaauagtgaagatgaugatattgaauagtttttttgtgtggtggatttuutttuuttutaggaaatttuutgatatauaaaauuutuuauutaaattttuttttuaaaagaugtutaaatutagtuaaaggaaatuuatuuttuaaaaauaatgtuugtuuugatgtuugatuugggtttgattttgugggaugtagtaguuggggtguatggaggtgtttuttutttttuuaattttuuattggtaauagauaauuuattaauagauauagtauatauauaauauatauagtttgtgtuuaattttuuattggtaauaaauaatauattaauaaaauauauauatgauauaauaaaugtauaatauatauauauaugtauaaauaauataaauagtuaaggauatauatauaaaauauatauataattatttuatgauataaatgatttgataaatatuatuagaatauaatauaatauuaaugtgggtgtautuattgttatgtuaaugaggattagataaugtagaggaugggatgggauauaggggaugggatgggauauaggatgaaauaatgtgatgattaatuggaatatgagaggtaaaauatggtaaaauatgataggtggtaaaatttaggattgguttaaguuaauuagaauugtgttgaaauuaauaggaauugtgtuattgttgataaaaatatattuaaagtugtttgaugaattaggaaauuaaaggaugtuaggtgauuagatgtgaauaauaggguggatttgautgaagaaugautgagtgtuuaggaugtuaugtugatttgttatgtaauggattgtaaugtauaaaatttgaugaaaatuugtgtataaaataaatttgaaagttaugtgattaatgtuauaauugaatgtgttuatgtaggatguggtttatauagaauattttgtautaatttatgauaatgagtggtuuauaugtgatgtgutgguuaatguuaatgguatgggtgttggtgaaaaaaaatattaat

SEQ ID NO: 666 - DNA, 7942 bp, Papilloma virus
atttaatattagaatatgattattttttattttatattggtttttgttagtttggttttggttatatatatatattttgtgttatattgattgtgtgttggtataaatttttaggttgttgtgttggggtttgggatgtgtttaatatattttatgatttttttagttatgtattttattttgatgttatatatgttatgtttttttttgatgttgtttttttttatatgtttaaagataaatgtttaaatgtttattatatatttttgttattaggtatattgtatatataatatatggatgtgaaaaatagattttatttatttatatttgtaatagttataagtgatatatttttttgtaatttttttttttatttttttggtaatttattttattgataatttatatattaaatagtttgtggtaatataggatttttttttttttttgtataattatgtttgtttgttaaagtattataatatttagtaatttgttttgtgataagttttataatttttggggttggatattgggtttatattgtagtatgtatttttgttttgttgatattttttaatatataatttagatgttggattttgttgattggatgtgatgatatttgttaatttattgttgagtttattttttttatgtttattatatttggttggtttatttgtttgttttgtttggtgtttgttaatgatgtaatattgtataatagtgttaatattattgtgtgatgttgatatgtaagtattgtgatgttgtttggaagtatgagatgttgtttatgataatttgtgtaatgtttaatatatggggttgatatgtgttgatatttgttgggatgttattttttgggatttttatgttttttgttttttttttttatatgtttgattaaattttatttttgttattatttttttgtttgttttttattgtaaagttttttgtttttatttttatgtatattattattttgtttagattatttaaaatatttattaagtttatatttattatttgtttgttttgtattttgttgggtttgtaataaattatgtgtttttttttttttattaaatgtatgatatagatgttattttgtttttaaatgtttgttaggttttttatgatttgttttattatatttttttgtattattaggtgtatgttttgtgtaaatatatttatgttttatataaaatggttttgtgtttggtatagtgtattttttgttgttgatattgttattattttatttttgtgttgtttattgtttggtttatttgtttgttttattgttgattgttttattgttattagttagtttattttatttttgattattaagtttatatttaatatgattatattttttgttattttttttattattattttgtgattttttgtatgttttataatatatgtttttattgtatttttgttgatataataaatttaaatttttttgtatattataattgaaatattttaattattttggtaaatttttattatttttattaatatgtttaattatataatatttttatttttattgtggtagttaatgtttttttaatttttataattatgttgggatattgtatatatgggtaaatgttataaattgtatattgtttttgtatgaatatgatgatgattaatttaaatttatattttttttgtttaattgttataggtttgattatagtgttgataatttatatggtttttgtgtatattattattttggtggttttaatgttttatgatggatatgtaatataattatattttgtttaaatagattataattattttatatattatggtggggttttatttattttgttgtttgttataatgttgtattgaaattgttattgtataagttaaaatttttttattatgttatttgtatattagtattatattgtttattattattgtattgtatatttatatgtgttaattgtttatatttattgttatgatgttgtaaggattttttgttaagtgtttgtttttattattttttgatatgttggtatatatttgtaatatttgtttgttttttttttgtatatttataatttgttatttatgttatatttatattattttatttattattatttttaatttttggatattattttaaaaattttatagttttgtattttaaatgttggaaaaatttgtgtaaattttttaaaaattttttatatggattttttttaataaattataatatatttggatgtttgtgtttttttagtataaaattttatttaaattaatttaagaatttatttatatattataggatatatttgagttttttggtaaaaattgatgttggtaattgtttatgtttttatttatattatttattatattgtggatatataatttgtatatatttattaatatattttttatgtgatttatttttattatatagttatttatattttgtattttggaattatgtttattttatgggtggtaattaaaattgttgtttatgtttatgtttttgtttaggatttattggtataaatgtattatttaattaatataaagtaaagtttttgggtaaaggtaaattatttttattgttaggatatatattttaattgttgtttttaatttttaggaaaaagagtttttgtattatgtttaatttaaattatgttttttttttgttttttttgttattttagttatggttgtgtaaatttatgttatgtttttttttatgatttagatatgttttgattattattattggatttgtgtgtttaatttgtaatttttaattgagtttattttatataaaataaaatgttttgtttttttgatttttattgagtatatttggtggtttattatggtggttattgttatagattttgtttttggatggtttgataatttgatgttaattgtaatttttgtaatttgttttgtgttatattgtgtttatttatttgtaatgttgtttgtttagatttttatattgtatgttttggtgtttttatgaaattttttgtatttatatgttattgttatgttatgttattattatttttgttatgatatttaatatgtttgatttttttttaaataaatgaattatttatatttatatgttaatatttttttgtttatttaatgatatttaatataataattatattattttttttttatataaaatattttaaattattgttatgttttgttataatatattgtttttatattttttatgtatatttattagtttattaataaataggatgtagatatagattattgttttataggtgatgattttgatgataggtggatatgtggttttggaggttttggaggtgttataggtatttatggtttttgtgtgtggatgttggtggtgtttttgttgttgttggtttgtagtgtttgaggtttttgtggtttatggggttgttggaaaatgtttttgttgttaggtatttgttatgatgtgtttttgagtagtgatgttgatttatgtgtttgttttttgtttaatgtgtatgttgaatatgatgtggatattatgtggattttttattaggattattaaattttataaattttatattttatttttgtgtatttttaaatatataagtttaaagtagatggattgtaatttggttattatttatatgtttattatttgatttataatattgttattgtatgttattattttgtgttgtagttgttaaaaatttttgataattttatggtttatgatatgtttaatatgttttatagtatagtaatattataaatatgtatatatatatatatatatatatattatttgtgggttgtgtttggttataatgatgataatatatatatattgttataattttaataaatataaaataaaataaaatgaatattataaaatatgttatgaatttggtgagaatgatagatatagttatatatgtgtttataattatgattatgaaaatgatatttatagataatttagtggtaaattttataaaaaaaatatggatgataaaaatataaaaggttataaaatataagtgatagtatgtgttataaattgtgttgatgttattgatatgtatatttaattgatgtatgtatatatgttttatatgaaaaagtgaaaatattaaatagattatttatgaaaatataaaaaattattgaatagtgttattttatgtttgttagatgtgttgtgtttgtatgaagatgttgtgttgatatagtttgtatgttttggagattgtggatgggggggttataataaggattttattttttgtgttgataatgtttagttgaaaattttatattgttggatttttataaaaaatttttaaatttatatttatgtttatgtttgagattattattttgtttgatatatggtaataggtgagtaggagggtgattattataatggtgtaggtggtaagtagggggatattgatattttgggtaattagggaattttggtagatattaaagatattattttttttgttgtaaataatttagattgtgtggatgaggtagataaggtagttgttgttttaaattataatgttgtagatgtttattatgaggatgttattaattatattgtagatatttatttagtagatatgttagttaaagatgtgtaaatttaggatgtaagtgatttggtagatattatgttgggggttgtggatgtttttgtagattagtatataataaaagattaggttgataattatgtgtgtggatatttttttagggatatttatgtaaataatggagatgattgttgttgttatattgtttattatgtggataaggttttagagtgggatgttgtgtggaattaaatatattggtatggtgtgttgtttaattttattagttgggatgaaaatatagtagtggtgtttttaattattgtatattgttaggataaaaatttttgtaattatgtttattttgatattaaaaattagtaagtgttgaaaatggatgtggtttaggattaaaaaatttgtaatattgaaatgtatttggatgtaattggagagtttttttatgataatttaaattgtttgaattattattttggtgggatgtatgtgtattattttttgtttaattttgtgtttatgtaataatagtattataattaggataggttggatgattttaagtttttttgtattttaatgttggaaataatggtgttagatataggggaatgtgataattattattaaatatattatatatatgtttaagaaatgttgttgggtgtaaagtgaatggaaggtgtgaaagatgggtattattatgaaagtgatatggataattattattataattgaaatatatagttgggtgatataggtaatttagtttaggattgtaaggtaatggaagtaatgggtgtgtatgaggaaaataaggatattggggatgttgaggtagatgtagataataataattattatgtttaaaataaaatgtaggattaataaaaaatgatgtagtgtttgtatttgtaaaaggtataaaaaaatgtttataggtatattgttggattattttggtgatatatggatggaggatatggatagagattttaatatttgtgattatttatatatagagtgtgtttgtagataataatatgtttgttaagagttaatgattgttattttgtagggataaaaagataatttttgtggttattattattattatttttttaaaattaagggttttatagattggatgttatgttttataaattttaatttaatggtttgggattatttaaattaaaaggtttatgtagaaaaatattgggtttttgggtttttaattatatttggatatgtttgaatttttaattattttttgttggaaatttatatttataattatttgtaggaaataatttgtttaaattattatgattttggttattgtttatatgattatttggattatatttattattttttataaatagatatttaatatttgtttgagttaatatgtaaaattttatgtttggaggatatttatttgtaattttatttttttggggaatattattattaagttttttaggatttttaataggaggggatgttgagtaattgttatattatgttttatttttgtattatttatgttttaaattaatgtatttaaaattatggaatgtttgattatttttattatatgggtaattatatatattgttatatatatttataggtttaataaatgtttattgattgtttggtatattattgttaaataagaaaaaagaatttgtatttgtttataaataatttgtgaaaaaattattttggttatggaatttattgggatatggtttattaaatatatatgtttttagattgagattgttatgatggtgatatgttttgttatgaaaaaaaggatgaggattattaagatattattggagttttagggttaataaattatttggtatgattaatgttgtatgtgttttggtgttattattgtatataattttgttagttaataaatagtgttaatatttatggtgagtattgtgattgtattgaaatatatgattttaatttttttttttgtgtatatttttatttttaaaattttttatggaagtagtattgttttttaaattaaatgttaaataaaaagttaatatgttttaatgtaattgttgattataatattgtatgtaagtattttatttatggtgataaaattttttgattgttaaattggaatggggtggtggtagatgtagaaattttttgtgtatgtttaaatagtgaagatgatgatattgaatagtttttttgtgtggtggattttttttttttttaggaaattttttgatatataaaattttttatttaaattttttttttaaaagatgtttaaatttagttaaaggaaatttattttttaaaaataatgtttgttttgatgtttgatttgggtttgattttgtgggatgtagtagttggggtgtatggaggtgttttttttttttttaattttttattggtaatagataatttattaatagatatagtatatatataatatatatagtttgtgtttaattttttattggtaataaataatatattaataaaatatatatatgatataataaatgtataatatatatatatatgtataaataatataaatagttaaggatatatatataaaatatatatataattattttatgatataaatgatttgataaatattattagaatataatataatattaatgtgggtgtatttattgttatgttaatgaggattagataatgtagaggatgggatgggatataggggatgggatgggatataggatgaaataatgtgatgattaattggaatatgagaggtaaaatatggtaaaatatgataggtggtaaaatttaggattggtttaagttaattagaattgtgttgaaattaataggaattgtgttattgttgataaaaatatatttaaagttgtttgatgaattaggaaattaaaggatgttaggtgattagatgtgaataatagggtggatttgattgaagaatgattgagtgtttaggatgttatgttgatttgttatgtaatggattgtaatgtataaaatttgatgaaaatttgtgtataaaataaatttgaaagttatgtgattaatgttataattgaatgtgtttatgtaggatgtggtttatatagaatattttgtattaatttatgataatgagtggtttatatgtgatgtgttggttaatgttaatggtatgggtgttggtgaaaaaaaatattaat

SEQ ID NO: 667 - DNA, 7844 bp, Papilloma virus
gaaagtttcaatcatacttttatatattgggagtgaccgaaaagggtttaagaccgaaaacggtacatataaaaggcagcttattctgtgtggacatatccatggagccacaattcaacaatccacaggaacgtccacgaagcctgcaccacttgagtgaggtattagaaatacctttaattgatcttagattatcatgtgtatattgcaaaaaagaactaacacgtgctgaggtatataattttgcatgcactgaattaaaattagtgtatagggatgattttccttatgcagtgtgcagagtatgtttattgttttatagtaaagttagaaaatataggtattatgactattcagtgtatggagctacactagaaagtataactaaaaaacagttatgtgatttattaataaggtgctacagatgtcaaagtccgttaactccggaggaaaagcaattgcattgtgacagaaaaagacgatttcatctaatagcacatggttggaccgggtcatgtttggggtgctggagacaaacatctagagaacctagagaatctacagtataatcatgcatggtaaagtaccaacgctgcaagacgttgtattagaactaacacctcaaacagaaattgacctacagtgcaatgagcaattggacagctcagaggatgaggatgaggatgaagtagaccatttgcaggagcggccacagcaagctagacaagctaaacaacatacgtgttacctaatacacgtaccttgttgtgagtgtaagtttgtggtgcagttggacattcagagtaccaaagaggacctgcgtgttgtacaacagctgcttatgggtgcgttaacagtaacgtgcccactctgcgcatcaagtaactaactgcaatggcgtcacctgaaggtacagatggggaggggaagggatgttgtggatggtttgaagtagaggcaattgtagaaaaaaaaacaggagataaaatatcagatgatgaaagtgacgaggaggatgaaatagatacagatttagatggatttatagacgattcatatatacaaaatatacaggcagacgcagaaacagtcaacaattgttgcaagtacaaacagcacatgcagataaacagacgttgcaaaaactaaaacgaaagtatatagctagtccattaagggatattagtaatcagcaaactgtgtgccgggaaggagtaaaacggaggcttattttatcagacctacaagacagcgggtatggcaatacattggaaactctggaaacaccagaacaggtagatgaagaggtacagggacgtgggtgcgggaatacacaaaatggaggctcacaaaacagtacctatagtaacaatagtgaggactctgtaatacatatggatattgatagaaacaatgaaacgccaacacaacaattgcaggacttgtttaaaagtagcaatttacaaggtaaattatattataaatttaaagaagtgtatggtattccattttcagaattggtgcgtacgtttaaaagtgatagtacatgttgcaatgattggatatgtgctatatttggtgttaatgaaacattagccgaggcactaaaaactataataaaaccacactgtatgtattatcatatgcaatgtttaacatgtacatggggggttatagtaatgatgctaattagatatacatgtggcaaaaacagaaaaacaattgcaaaagcattaagctcaatattaaatgtaccacaggagcaaatgttaattcaaccaccaaaaatacgaagtcctgctgtagctttatatttttataaaacagcaatgtcaaatattagtgatgtgtatggagacacaccagaatggatacaaagacaaacacaattgcaacacagtttacaggatagtcaatttgaattatctaaaatggtgcagtgggcatttgataatgaagtaacagatgatagccaaattgcgtttcaatatgcacaattagcagatgtagacagcaatgcacaagcctttttaaaaagcaatatgcaggcaaaatatgtaaaggattgtggaataatgtgtagacattataaaagggcacaacagcaacaaatgaatatgtgccagtggataaagcacatatgtagtaaaacagatgaagggggtgattggaaacccattgtacaatttttaagatatcaaggggtcgatttcatttcatttctaagttactttaaattatttctacaaggaacacctaaacataactgtttggtactttgtggaccgccaaatacaggtaaatcatgctttgctatgagtcttataaagttttttcaagggtctgtcatttcatttgtgaattcacaaagccacttttggttgcagccattagacaatgctaaacttgggttgttggatgatgcaacagaaatatgttggaaatatatagacgattatttaaggaatttggtagatggaaatcctataagtttagatagaaaacataaacaattagtacaaataaaatgtccaccattactaattacaaccaatataaatcctatgctagatgctaaattacgatatttacacagtagaatgttagtgtttcagtttcaaaatccatttccattagataataatggtaatcctgtatatgaattaagtaatgtaaactggaaatgtttctttacaaggacgtggtccagattaaatttggataacgacgaggacaaagaaaacaatggagacgctttcccaacgtttaaatgcgtgccagaacaaaatactagactgttttgaaaaaagatagtagatgtattgcagatcatatagaatattggaaagctgtgcgacatgaaaatgtgctatactataaagcaagagaaaatgacattactgtactaaaccaccagatggtgccttgtttacaagtatgtaaagcaaaagcatgtagtgcaatagaagtgcaaatagcactggaatcattaagtacaacaatatataacaatgaagagtggacattaagagacacatgcgaggaactatggcttactgaacctaaaaaatgctttaaaaaagaaggacaacatatagaagtatggtttgatggtagtaaaaacaattgtatgcaatatgtagcctggaaatatatatattacaatggagattgtgggtggcaaaaagtgtgttctggggtagactatagaggtatatattatgtacatgatggccacaaaacatactacacagactttgaacaagaggccaaaaaatttgggtgtaaaaacatatgggaagtacatatggaaaatgagagtatttattgtcctgactctgtgtctagtacctgtagatacaacgtatcccctgttgaaactgttaacgaatacaacacccacaagaccaccaccaccacctccacgtccgtgggcaaccaagacgccgcagtatcccacagaccaggaaaacgacccagactacgggaatcagaatttgactcctccagagagtcccacgcaaagtgtgtcacaacacacacacacatcagcgacacagacaataccgacagtagaagtagaagtatcaacaacaacaaccaccctggtgataagactacgcctgtagtacatttaaaaggtgaacctaacagattaaaatgttgtagatatcgatttcaaaaatataaaacattgtttgtggatgtaacatcaacatatcattggacaagtacagacaataaaaattatagcataattacaattatatataaggatgaaacacaacgaaacagctttttaagtcatgtaaaaattccagtagtgtacaggttagtttgggacaaatgagttttccataaagtgctgtatatattgtatatacatttgtgttattgtaacacacaaatacgtgaagtgtacctgccatacattgctgctacgcatatatattgcaaccattgatttttgtgttattggtgtgtttgcgctttgcttttgtgtttgtttgcttgtgtgtcatgttgtcccgcttttgctatctgcctctgtgttttccagttgtatattattaataatattgttttggtttgttatagccacatccttttttaatacatttataatatttttgatatttttttactgtcctgtgctgtgtatatatttacatgctttgtggataataaataatatgtaaatgtagtagtactgttactactatggttgcccaccgtgccacacgacgcaaacgcgcatctgcaacacaactatataaaacatgtaagttgtctggtacatgtccagaggatgttgttaataaaatagagcaaaaaacatgggctgataaaatattgcaatggggaagtttatttacatattttggaggccttggcattggtacaggaactgggtctgggggtcgtgcaggctatgttccattggggtctaggccttccacaatagttgatgtaactccggcgcgaccacctattgttgtggaatccgtagggcctacagacccttccattgttacattagttgaggagtccagtgttatagaatctggtgcagggattcctaattttactgggtctgggggatttgaaattacatcctcatcaacaactacacctgccgtgttggatattacaccaacctctagtactgtacatgtcagtagtacccatataaccaatccgttatttattgatccccctgttattgaggccccacaaacaggcgaggtgtctggcaatattttaattagcacacccacatctggtatacatagctatgaagaaatacctatgcaaacatttgctgttcacggttctggtacagaacctattagtagtactcctattccaggctttaggcgtattgcagctcctagattatatagaaaagcatttcagcaggttaaggtaactgaccctgcatttcttgatagacctgcaacattagtatctgctgataatccactttttgaaggtactgacacatctttagctttttctccgtcgggtgtggctcctgaccctgattttatgaatatagtagcattacataggcctgcatttactacacgtaggggtggtgtacgttttagtaggcttggcagaaaggctactatacaaacacgtagaggcacacaaataggtgcccgtgtgcattattattatgatataagtcctattgcacaggctgaggaaattgaaatgcagccattattgtctgcaaataattcatttgatggcctatatgatatttatgcaaatatagatgatgaagcacctggtttgtctagccagtcagttgctacaccttctgcacacttacctataaagccttccacattgtcttttgctagtaacaccactaatgtaactgcccctttaggtaatgtgtgggaaacaccattttattcaggtcctgacatagtgttgcctacaggccccagtacgtggccctttgttcctcagtctccttatgatgttacccatgatgtatatatacagggatcctcctttgcattatggcctgtgtatttttttagacgtaggcgccgtaaacgtattccctatttttttgcagatggcgacgtggcggcctagtgaaaataaggtgtatctacctccaacacctgtttcaaaggttgtggcaacggattcctatgtaaaacgcactagtatattttatcatgcaggcagttcacgattgcttgccgtaggacatccctattactctgtgactaaggacaataccaaaacaaacattcccaaagttagtgcatatcaatatagggtatttagggtacggttgcccgaccctaataagtttgggcttccagatactaatatttataatccggaccaggaacggttagtgtgggcatgtgtaggtttggaggtaggccgcggacagcctttaggtgctgggctaagtggccatccattgtttaataggctggatgatactgaaagttccaatttagcaaataataatgttatagaagatagtagggacaatatatcagttgatggcaagcaaacacagttgtgtattgttggatgtactcccgctatgggtgaacattggactaaaggtgctgtgtgtaagtccacacaagttaccacaggggactgcccgcctcttgcattaattaatacacctatagaggatggggacatgatagacacaggatttggcgctatggactttaaggtgttgcaggaatctaaggctgaggtacctttagacattgtacaatccacctgtaaatatcctgactatttaaaaatgtctgcagatgcctatggtgattctatgtggttttacttacgcagggaacaattatttgccagacattattttaatagggctggtaaagttggggaaacaatacctgcagagttatatttaaagggtagcaatggtagagaaccccctccgagttctgtatatgttgctacgcctagtgggtctatgattacgtctgaggcacagttatttaataaaccttattggttgcaacgtgcccaaggccataataatggcatttgctggggtaatcaattatttgttactgtagtagatactactagaagtactaacatgactattagtactgctacagaacagttaagtaaatatgatgcacgaaaaattaatcagtaccttagacatgtggaggaatatgaattacaatttgtttttcaattatgcaaaattactttgtctgcagaggttatggcatatttacataatatgaatgctaacctactggaggactggaatattgggttatccccgccagtggccaccagcctagaagataaatatagatatgttagaagcacagctataacatgtcaacgggaacagccaccaacagaaaaacaggacccattagctaaatataaattttgggatgttaacttacaggacagtttttctacagacctggatcaatttccactgggtagaaaatttttaatgcaactgggcactaggtcaaagcctgctgtagctacctctaaaaagcgatctgctcctacctccacctctacaccagcaaaacgtaaaaggcggtagtgtgttgttgtgtgtttgtgtaactgtgtttgtgtgttgtatatatggtatgtttgtgtatgtgctttattttatactttgtatgtgtatgttgtgtttgtgtaaatgtttgtgtgaaatgtttgtgtgtgtattcattgtatgtatgactgtatatatgtgtaatgtttgtgtgtctgtaataaacatgaatgagtgcttttacgcgtggttgcataaactaaggtgtgtcattattgtggcttttgttttgtaagttattgtgtacagtgtactatgtgtattgtgcatacatatatataccataacatactccattttgttgtttttccgccattttgtacatgcaaccgaattcggttgcatggcctagtgccattatttaaactaaaaggaattcggttgcatggcctagtgccattatttaaaccaaaaggcccttttcagcagaacagttaatcctttggcatattgccgtttcctgtgttttatacttgaattatgtacagtaccgcaccctgtattactcacaggtactatgactgccaactatgcttttatctgcatactttagtgctgttgggcacacatttttatacatgtgtctgcaactttggtgttttggcttgcagaatacactatgtaggccaagtatctgtcagtatctgttttgcaaacatgtaacatacaattactcattttttaaaaccgtttacggtcgtgcaaaaacaggtttcttttaattgtt

SEQ ID NO: 668 - DNA, 7844 bp, Papilloma virus
gaaagtttuaatuatauttttatatattgggagtgauugaaaagggtttaagauugaaaauggtauatataaaagguaguttattutgtgtggauatatuuatggaguuauaattuaauaatuuauaggaaugtuuaugaaguutguauuauttgagtgaggtattagaaatauutttaattgatuttagattatuatgtgtatattguaaaaaagaautaauaugtgutgaggtatataattttguatguautgaattaaaattagtgtatagggatgattttuuttatguagtgtguagagtatgtttattgttttatagtaaagttagaaaatataggtattatgautattuagtgtatggagutauautagaaagtataautaaaaaauagttatgtgatttattaataaggtgutauagatgtuaaagtuugttaautuuggaggaaaaguaattguattgtgauagaaaaagaugatttuatutaataguauatggttggauugggtuatgtttggggtgutggagauaaauatutagagaauutagagaatutauagtataatuatguatggtaaagtauuaaugutguaagaugttgtattagaautaauauutuaaauagaaattgauutauagtguaatgaguaattggauagutuagaggatgaggatgaggatgaagtagauuatttguaggagugguuauaguaagutagauaagutaaauaauataugtgttauutaatauaugtauuttgttgtgagtgtaagtttgtggtguagttggauattuagagtauuaaagaggauutgugtgttgtauaauagutguttatgggtgugttaauagtaaugtguuuaututguguatuaagtaautaautguaatggugtuauutgaaggtauagatggggaggggaagggatgttgtggatggtttgaagtagagguaattgtagaaaaaaaaauaggagataaaatatuagatgatgaaagtgaugaggaggatgaaatagatauagatttagatggatttatagaugattuatatatauaaaatatauagguagauguagaaauagtuaauaattgttguaagtauaaauaguauatguagataaauagaugttguaaaaautaaaaugaaagtatatagutagtuuattaagggatattagtaatuaguaaautgtgtguugggaaggagtaaaauggagguttattttatuagauutauaagauagugggtatgguaatauattggaaaututggaaauauuagaauaggtagatgaagaggtauagggaugtgggtgugggaatauauaaaatggaggutuauaaaauagtauutatagtaauaatagtgaggaututgtaatauatatggatattgatagaaauaatgaaauguuaauauaauaattguaggauttgtttaaaagtaguaatttauaaggtaaattatattataaatttaaagaagtgtatggtattuuattttuagaattggtgugtaugtttaaaagtgatagtauatgttguaatgattggatatgtgutatatttggtgttaatgaaauattaguugagguautaaaaautataataaaauuauautgtatgtattatuatatguaatgtttaauatgtauatggggggttatagtaatgatgutaattagatatauatgtgguaaaaauagaaaaauaattguaaaaguattaagutuaatattaaatgtauuauaggaguaaatgttaattuaauuauuaaaaataugaagtuutgutgtagutttatatttttataaaauaguaatgtuaaatattagtgatgtgtatggagauauauuagaatggatauaaagauaaauauaattguaauauagtttauaggatagtuaatttgaattatutaaaatggtguagtggguatttgataatgaagtaauagatgataguuaaattgugtttuaatatguauaattaguagatgtagauaguaatguauaaguutttttaaaaaguaatatguagguaaaatatgtaaaggattgtggaataatgtgtagauattataaaaggguauaauaguaauaaatgaatatgtguuagtggataaaguauatatgtagtaaaauagatgaagggggtgattggaaauuuattgtauaatttttaagatatuaaggggtugatttuatttuatttutaagttautttaaattatttutauaaggaauauutaaauataautgtttggtautttgtggauuguuaaatauaggtaaatuatgutttgutatgagtuttataaagttttttuaagggtutgtuatttuatttgtgaattuauaaaguuauttttggttguaguuattagauaatgutaaauttgggttgttggatgatguaauagaaatatgttggaaatatatagaugattatttaaggaatttggtagatggaaatuutataagtttagatagaaaauataaauaattagtauaaataaaatgtuuauuattautaattauaauuaatataaatuutatgutagatgutaaattaugatatttauauagtagaatgttagtgtttuagtttuaaaatuuatttuuattagataataatggtaatuutgtatatgaattaagtaatgtaaautggaaatgtttutttauaaggaugtggtuuagattaaatttggataaugaugaggauaaagaaaauaatggagaugutttuuuaaugtttaaatgugtguuagaauaaaatautagautgttttgaaaaaagatagtagatgtattguagatuatatagaatattggaaagutgtgugauatgaaaatgtgutatautataaaguaagagaaaatgauattautgtautaaauuauuagatggtguuttgtttauaagtatgtaaaguaaaaguatgtagtguaatagaagtguaaataguautggaatuattaagtauaauaatatataauaatgaagagtggauattaagagauauatgugaggaautatgguttautgaauutaaaaaatgutttaaaaaagaaggauaauatatagaagtatggtttgatggtagtaaaaauaattgtatguaatatgtaguutggaaatatatatattauaatggagattgtgggtgguaaaaagtgtgttutggggtagautatagaggtatatattatgtauatgatgguuauaaaauatautauauagautttgaauaagagguuaaaaaatttgggtgtaaaaauatatgggaagtauatatggaaaatgagagtatttattgtuutgaututgtgtutagtauutgtagatauaaugtatuuuutgttgaaautgttaaugaatauaauauuuauaagauuauuauuauuauutuuaugtuugtggguaauuaagauguuguagtatuuuauagauuaggaaaaugauuuagautaugggaatuagaatttgautuutuuagagagtuuuauguaaagtgtgtuauaauauauauauauatuagugauauagauaatauugauagtagaagtagaagtatuaauaauaauaauuauuutggtgataagautauguutgtagtauatttaaaaggtgaauutaauagattaaaatgttgtagatatugatttuaaaaatataaaauattgtttgtggatgtaauatuaauatatuattggauaagtauagauaataaaaattataguataattauaattatatataaggatgaaauauaaugaaauagutttttaagtuatgtaaaaattuuagtagtgtauaggttagtttgggauaaatgagttttuuataaagtgutgtatatattgtatatauatttgtgttattgtaauauauaaataugtgaagtgtauutguuatauattgutgutauguatatatattguaauuattgatttttgtgttattggtgtgtttgugutttguttttgtgtttgtttguttgtgtgtuatgttgtuuuguttttgutatutguututgtgttttuuagttgtatattattaataatattgttttggtttgttataguuauatuuttttttaatauatttataatatttttgatatttttttautgtuutgtgutgtgtatatatttauatgutttgtggataataaataatatgtaaatgtagtagtautgttautautatggttguuuauugtguuauaugauguaaauguguatutguaauauaautatataaaauatgtaagttgtutggtauatgtuuagaggatgttgttaataaaatagaguaaaaaauatgggutgataaaatattguaatggggaagtttatttauatattttggagguuttgguattggtauaggaautgggtutgggggtugtguaggutatgttuuattggggtutagguuttuuauaatagttgatgtaautuuggugugauuauutattgttgtggaatuugtaggguutauagauuuttuuattgttauattagttgaggagtuuagtgttatagaatutggtguagggattuutaattttautgggtutgggggatttgaaattauatuutuatuaauaautauauutguugtgttggatattauauuaauututagtautgtauatgtuagtagtauuuatataauuaatuugttatttattgatuuuuutgttattgagguuuuauaaauaggugaggtgtutgguaatattttaattaguauauuuauatutggtatauatagutatgaagaaatauutatguaaauatttgutgttuauggttutggtauagaauutattagtagtautuutattuuaggutttaggugtattguagutuutagattatatagaaaaguatttuaguaggttaaggtaautgauuutguatttuttgatagauutguaauattagtatutgutgataatuuautttttgaaggtautgauauatutttagutttttutuugtugggtgtggutuutgauuutgattttatgaatatagtaguattauatagguutguatttautauaugtaggggtggtgtaugttttagtagguttgguagaaaggutautatauaaauaugtagagguauauaaataggtguuugtgtguattattattatgatataagtuutattguauaggutgaggaaattgaaatguaguuattattgtutguaaataattuatttgatgguutatatgatatttatguaaatatagatgatgaaguauutggtttgtutaguuagtuagttgutauauuttutguauauttauutataaaguuttuuauattgtuttttgutagtaauauuautaatgtaautguuuutttaggtaatgtgtgggaaauauuattttattuaggtuutgauatagtgttguutauagguuuuagtaugtgguuutttgttuutuagtutuuttatgatgttauuuatgatgtatatatauagggatuutuutttguattatgguutgtgtatttttttagaugtagguguugtaaaugtattuuutatttttttguagatggugaugtggugguutagtgaaaataaggtgtatutauutuuaauauutgtttuaaaggttgtgguaauggattuutatgtaaaauguautagtatattttatuatguagguagttuaugattguttguugtaggauatuuutattaututgtgautaaggauaatauuaaaauaaauattuuuaaagttagtguatatuaatatagggtatttagggtauggttguuugauuutaataagtttggguttuuagatautaatatttataatuuggauuaggaauggttagtgtggguatgtgtaggtttggaggtagguuguggauaguutttaggtgutgggutaagtgguuatuuattgtttaataggutggatgatautgaaagttuuaatttaguaaataataatgttatagaagatagtagggauaatatatuagttgatgguaaguaaauauagttgtgtattgttggatgtautuuugutatgggtgaauattggautaaaggtgutgtgtgtaagtuuauauaagttauuauaggggautguuuguututtguattaattaatauauutatagaggatggggauatgatagauauaggatttggugutatggautttaaggtgttguaggaatutaaggutgaggtauutttagauattgtauaatuuauutgtaaatatuutgautatttaaaaatgtutguagatguutatggtgattutatgtggttttauttauguagggaauaattatttguuagauattattttaatagggutggtaaagttggggaaauaatauutguagagttatatttaaagggtaguaatggtagagaauuuuutuugagttutgtatatgttgutauguutagtgggtutatgattaugtutgagguauagttatttaataaauuttattggttguaaugtguuuaagguuataataatgguatttgutggggtaatuaattatttgttautgtagtagatautautagaagtautaauatgautattagtautgutauagaauagttaagtaaatatgatguaugaaaaattaatuagtauuttagauatgtggaggaatatgaattauaatttgtttttuaattatguaaaattautttgtutguagaggttatgguatatttauataatatgaatgutaauutautggaggautggaatattgggttatuuuuguuagtgguuauuaguutagaagataaatatagatatgttagaaguauagutataauatgtuaaugggaauaguuauuaauagaaaaauaggauuuattagutaaatataaattttgggatgttaauttauaggauagtttttutauagauutggatuaatttuuautgggtagaaaatttttaatguaautggguautaggtuaaaguutgutgtagutauututaaaaagugatutgutuutauutuuauututauauuaguaaaaugtaaaagguggtagtgtgttgttgtgtgtttgtgtaautgtgtttgtgtgttgtatatatggtatgtttgtgtatgtgutttattttatautttgtatgtgtatgttgtgtttgtgtaaatgtttgtgtgaaatgtttgtgtgtgtattuattgtatgtatgautgtatatatgtgtaatgtttgtgtgtutgtaataaauatgaatgagtguttttaugugtggttguataaautaaggtgtgtuattattgtgguttttgttttgtaagttattgtgtauagtgtautatgtgtattgtguatauatatatatauuataauatautuuattttgttgtttttuuguuattttgtauatguaauugaattuggttguatgguutagtguuattatttaaautaaaaggaattuggttguatgguutagtguuattatttaaauuaaaagguuuttttuaguagaauagttaatuutttgguatattguugtttuutgtgttttatauttgaattatgtauagtauuguauuutgtattautuauaggtautatgautguuaautatguttttatutguatautttagtgutgttggguauauatttttatauatgtgtutguaautttggtgttttgguttguagaatauautatgtagguuaagtatutgtuagtatutgttttguaaauatgtaauatauaattautuattttttaaaauugtttauggtugtguaaaaauaggtttuttttaattgtt

SEQ ID NO: 669 - DNA, 7844 bp, Papilloma virus
gaaagttttaattatatttttatatattgggagtgattgaaaagggtttaagattgaaaatggtatatataaaaggtagtttattttgtgtggatatatttatggagttataatttaataatttataggaatgtttatgaagtttgtattatttgagtgaggtattagaaatatttttaattgattttagattattatgtgtatattgtaaaaaagaattaatatgtgttgaggtatataattttgtatgtattgaattaaaattagtgtatagggatgattttttttatgtagtgtgtagagtatgtttattgttttatagtaaagttagaaaatataggtattatgattatttagtgtatggagttatattagaaagtataattaaaaaatagttatgtgatttattaataaggtgttatagatgttaaagtttgttaattttggaggaaaagtaattgtattgtgatagaaaaagatgattttatttaatagtatatggttggattgggttatgtttggggtgttggagataaatatttagagaatttagagaatttatagtataattatgtatggtaaagtattaatgttgtaagatgttgtattagaattaatattttaaatagaaattgatttatagtgtaatgagtaattggatagtttagaggatgaggatgaggatgaagtagattatttgtaggagtggttatagtaagttagataagttaaataatatatgtgttatttaatatatgtattttgttgtgagtgtaagtttgtggtgtagttggatatttagagtattaaagaggatttgtgtgttgtataatagttgtttatgggtgtgttaatagtaatgtgtttattttgtgtattaagtaattaattgtaatggtgttatttgaaggtatagatggggaggggaagggatgttgtggatggtttgaagtagaggtaattgtagaaaaaaaaataggagataaaatattagatgatgaaagtgatgaggaggatgaaatagatatagatttagatggatttatagatgatttatatatataaaatatataggtagatgtagaaatagttaataattgttgtaagtataaatagtatatgtagataaatagatgttgtaaaaattaaaatgaaagtatatagttagtttattaagggatattagtaattagtaaattgtgtgttgggaaggagtaaaatggaggtttattttattagatttataagatagtgggtatggtaatatattggaaattttggaaatattagaataggtagatgaagaggtatagggatgtgggtgtgggaatatataaaatggaggtttataaaatagtatttatagtaataatagtgaggattttgtaatatatatggatattgatagaaataatgaaatgttaatataataattgtaggatttgtttaaaagtagtaatttataaggtaaattatattataaatttaaagaagtgtatggtattttatttttagaattggtgtgtatgtttaaaagtgatagtatatgttgtaatgattggatatgtgttatatttggtgttaatgaaatattagttgaggtattaaaaattataataaaattatattgtatgtattattatatgtaatgtttaatatgtatatggggggttatagtaatgatgttaattagatatatatgtggtaaaaatagaaaaataattgtaaaagtattaagtttaatattaaatgtattataggagtaaatgttaatttaattattaaaaatatgaagttttgttgtagttttatatttttataaaatagtaatgttaaatattagtgatgtgtatggagatatattagaatggatataaagataaatataattgtaatatagtttataggatagttaatttgaattatttaaaatggtgtagtgggtatttgataatgaagtaatagatgatagttaaattgtgttttaatatgtataattagtagatgtagatagtaatgtataagtttttttaaaaagtaatatgtaggtaaaatatgtaaaggattgtggaataatgtgtagatattataaaagggtataatagtaataaatgaatatgtgttagtggataaagtatatatgtagtaaaatagatgaagggggtgattggaaatttattgtataatttttaagatattaaggggttgattttattttatttttaagttattttaaattatttttataaggaatatttaaatataattgtttggtattttgtggattgttaaatataggtaaattatgttttgttatgagttttataaagtttttttaagggtttgttattttatttgtgaatttataaagttatttttggttgtagttattagataatgttaaatttgggttgttggatgatgtaatagaaatatgttggaaatatatagatgattatttaaggaatttggtagatggaaattttataagtttagatagaaaatataaataattagtataaataaaatgtttattattattaattataattaatataaattttatgttagatgttaaattatgatatttatatagtagaatgttagtgttttagttttaaaatttatttttattagataataatggtaattttgtatatgaattaagtaatgtaaattggaaatgtttttttataaggatgtggtttagattaaatttggataatgatgaggataaagaaaataatggagatgtttttttaatgtttaaatgtgtgttagaataaaatattagattgttttgaaaaaagatagtagatgtattgtagattatatagaatattggaaagttgtgtgatatgaaaatgtgttatattataaagtaagagaaaatgatattattgtattaaattattagatggtgttttgtttataagtatgtaaagtaaaagtatgtagtgtaatagaagtgtaaatagtattggaattattaagtataataatatataataatgaagagtggatattaagagatatatgtgaggaattatggtttattgaatttaaaaaatgttttaaaaaagaaggataatatatagaagtatggtttgatggtagtaaaaataattgtatgtaatatgtagtttggaaatatatatattataatggagattgtgggtggtaaaaagtgtgttttggggtagattatagaggtatatattatgtatatgatggttataaaatatattatatagattttgaataagaggttaaaaaatttgggtgtaaaaatatatgggaagtatatatggaaaatgagagtatttattgttttgattttgtgtttagtatttgtagatataatgtattttttgttgaaattgttaatgaatataatatttataagattattattattatttttatgtttgtgggtaattaagatgttgtagtattttatagattaggaaaatgatttagattatgggaattagaatttgatttttttagagagttttatgtaaagtgtgttataatatatatatatattagtgatatagataatattgatagtagaagtagaagtattaataataataattattttggtgataagattatgtttgtagtatatttaaaaggtgaatttaatagattaaaatgttgtagatattgattttaaaaatataaaatattgtttgtggatgtaatattaatatattattggataagtatagataataaaaattatagtataattataattatatataaggatgaaatataatgaaatagttttttaagttatgtaaaaattttagtagtgtataggttagtttgggataaatgagttttttataaagtgttgtatatattgtatatatatttgtgttattgtaatatataaatatgtgaagtgtatttgttatatattgttgttatgtatatatattgtaattattgatttttgtgttattggtgtgtttgtgttttgtttttgtgtttgtttgtttgtgtgttatgttgttttgtttttgttatttgtttttgtgttttttagttgtatattattaataatattgttttggtttgttatagttatatttttttttaatatatttataatatttttgatatttttttattgttttgtgttgtgtatatatttatatgttttgtggataataaataatatgtaaatgtagtagtattgttattattatggttgtttattgtgttatatgatgtaaatgtgtatttgtaatataattatataaaatatgtaagttgtttggtatatgtttagaggatgttgttaataaaatagagtaaaaaatatgggttgataaaatattgtaatggggaagtttatttatatattttggaggttttggtattggtataggaattgggtttgggggttgtgtaggttatgttttattggggtttaggttttttataatagttgatgtaattttggtgtgattatttattgttgtggaatttgtagggtttatagatttttttattgttatattagttgaggagtttagtgttatagaatttggtgtagggatttttaattttattgggtttgggggatttgaaattatatttttattaataattatatttgttgtgttggatattatattaatttttagtattgtatatgttagtagtatttatataattaatttgttatttattgatttttttgttattgaggttttataaataggtgaggtgtttggtaatattttaattagtatatttatatttggtatatatagttatgaagaaatatttatgtaaatatttgttgtttatggttttggtatagaatttattagtagtatttttattttaggttttaggtgtattgtagtttttagattatatagaaaagtattttagtaggttaaggtaattgattttgtattttttgatagatttgtaatattagtatttgttgataatttattttttgaaggtattgatatatttttagttttttttttgttgggtgtggtttttgattttgattttatgaatatagtagtattatataggtttgtatttattatatgtaggggtggtgtatgttttagtaggtttggtagaaaggttattatataaatatgtagaggtatataaataggtgtttgtgtgtattattattatgatataagttttattgtataggttgaggaaattgaaatgtagttattattgtttgtaaataatttatttgatggtttatatgatatttatgtaaatatagatgatgaagtatttggtttgtttagttagttagttgttatattttttgtatatttatttataaagttttttatattgttttttgttagtaatattattaatgtaattgtttttttaggtaatgtgtgggaaatattattttatttaggttttgatatagtgttgtttataggttttagtatgtggttttttgttttttagtttttttatgatgttatttatgatgtatatatatagggatttttttttgtattatggtttgtgtatttttttagatgtaggtgttgtaaatgtattttttatttttttgtagatggtgatgtggtggtttagtgaaaataaggtgtatttatttttaatatttgttttaaaggttgtggtaatggatttttatgtaaaatgtattagtatattttattatgtaggtagtttatgattgtttgttgtaggatatttttattattttgtgattaaggataatattaaaataaatatttttaaagttagtgtatattaatatagggtatttagggtatggttgtttgattttaataagtttgggtttttagatattaatatttataatttggattaggaatggttagtgtgggtatgtgtaggtttggaggtaggttgtggatagtttttaggtgttgggttaagtggttatttattgtttaataggttggatgatattgaaagttttaatttagtaaataataatgttatagaagatagtagggataatatattagttgatggtaagtaaatatagttgtgtattgttggatgtatttttgttatgggtgaatattggattaaaggtgttgtgtgtaagtttatataagttattataggggattgtttgttttttgtattaattaatatatttatagaggatggggatatgatagatataggatttggtgttatggattttaaggtgttgtaggaatttaaggttgaggtatttttagatattgtataatttatttgtaaatattttgattatttaaaaatgtttgtagatgtttatggtgattttatgtggttttatttatgtagggaataattatttgttagatattattttaatagggttggtaaagttggggaaataatatttgtagagttatatttaaagggtagtaatggtagagaattttttttgagttttgtatatgttgttatgtttagtgggtttatgattatgtttgaggtatagttatttaataaattttattggttgtaatgtgtttaaggttataataatggtatttgttggggtaattaattatttgttattgtagtagatattattagaagtattaatatgattattagtattgttatagaatagttaagtaaatatgatgtatgaaaaattaattagtattttagatatgtggaggaatatgaattataatttgttttttaattatgtaaaattattttgtttgtagaggttatggtatatttatataatatgaatgttaatttattggaggattggaatattgggttatttttgttagtggttattagtttagaagataaatatagatatgttagaagtatagttataatatgttaatgggaatagttattaatagaaaaataggatttattagttaaatataaattttgggatgttaatttataggatagtttttttatagatttggattaatttttattgggtagaaaatttttaatgtaattgggtattaggttaaagtttgttgtagttatttttaaaaagtgatttgtttttatttttatttttatattagtaaaatgtaaaaggtggtagtgtgttgttgtgtgtttgtgtaattgtgtttgtgtgttgtatatatggtatgtttgtgtatgtgttttattttatattttgtatgtgtatgttgtgtttgtgtaaatgtttgtgtgaaatgtttgtgtgtgtatttattgtatgtatgattgtatatatgtgtaatgtttgtgtgtttgtaataaatatgaatgagtgtttttatgtgtggttgtataaattaaggtgtgttattattgtggtttttgttttgtaagttattgtgtatagtgtattatgtgtattgtgtatatatatatatattataatatattttattttgttgtttttttgttattttgtatatgtaattgaatttggttgtatggtttagtgttattatttaaattaaaaggaatttggttgtatggtttagtgttattatttaaattaaaaggttttttttagtagaatagttaattttttggtatattgttgttttttgtgttttatatttgaattatgtatagtattgtattttgtattatttataggtattatgattgttaattatgtttttatttgtatattttagtgttgttgggtatatatttttatatatgtgtttgtaattttggtgttttggtttgtagaatatattatgtaggttaagtatttgttagtatttgttttgtaaatatgtaatatataattatttattttttaaaattgtttatggttgtgtaaaaataggttttttttaattgtt

SEQ ID NO: 670 - DNA, 7844 bp, Papilloma virus
ctttcaaagttagtatgaaaatatataaccctcactggcttttcccaaattctggcttttgccatgtatattttccgtcgaataagacacacctgtataggtacctcggtgttaagttgttaggtgtccttgcaggtgcttcggacgtggtgaactcactccataatctttatggaaattaactagaatctaatagtacacatataacgttttttcttgattgtgcacgactccatatattaaaacgtacgtgacttaattttaatcacatatccctactaaaaggaatacgtcacacgtctcatacaaataacaaaatatcatttcaatcttttatatccataatactgataagtcacatacctcgatgtgatctttcatattgattttttgtcaatacactaaataattattccacgatgtctacagtttcaggcaattgaggcctccttttcgttaacgtaacactgtctttttctgctaaagtagattatcgtgtaccaacctggcccagtacaaaccccacgacctctgtttgtagatctcttggatctcttagatgtcatattagtacgtaccatttcatggttgcgacgttctgcaacataatcttgattgtggagtttgtctttaactggatgtcacgttactcgttaacctgtcgagtctcctactcctactcctacttcatctggtaaacgtcctcgccggtgtcgttcgatctgttcgatttgttgtatgcacaatggattatgtgcatggaacaacactcacattcaaacaccacgtcaacctgtaagtctcatggtttctcctggacgcacaacatgttgtcgacgaatacccacgcaattgtcattgcacgggtgagacgcgtagttcattgattgacgttaccgcagtggacttccatgtctacccctccccttccctacaacacctaccaaacttcatctccgttaacatctttttttttgtcctctattttatagtctactactttcactgctcctcctactttatctatgtctaaatctacctaaatatctgctaagtatatatgttttatatgtccgtctgcgtctttgtcagttgttaacaacgttcatgtttgtcgtgtacgtctatttgtctgcaacgtttttgattttgctttcatatatcgatcaggtaattccctataatcattagtcgtttgacacacggcccttcctcattttgcctccgaataaaatagtctggatgttctgtcgcccataccgttatgtaacctttgagacctttgtggtcttgtccatctacttctccatgtccctgcacccacgcccttatgtgttttacctccgagtgttttgtcatggatatcattgttatcactcctgagacattatgtatacctataactatctttgttactttgcggttgtgttgttaacgtcctgaacaaattttcatcgttaaatgttccatttaatataatatttaaatttcttcacataccataaggtaaaagtcttaaccacgcatgcaaattttcactatcatgtacaacgttactaacctatacacgatataaaccacaattactttgtaatcggctccgtgatttttgatattattttggtgtgacatacataatagtatacgttacaaattgtacatgtaccccccaatatcattactacgattaatctatatgtacaccgtttttgtctttttgttaacgttttcgtaattcgagttataatttacatggtgtcctcgtttacaattaagttggtggtttttatgcttcaggacgacatcgaaatataaaaatattttgtcgttacagtttataatcactacacatacctctgtgtggtcttacctatgtttctgtttgtgttaacgttgtgtcaaatgtcctatcagttaaacttaatagattttaccacgtcacccgtaaactattacttcattgtctactatcggtttaacgcaaagttatacgtgttaatcgtctacatctgtcgttacgtgttcggaaaaatttttcgttatacgtccgttttatacatttcctaacaccttattacacatctgtaatattttcccgtgttgtcgttgtttacttatacacggtcacctatttcgtgtatacatcattttgtctacttcccccactaacctttgggtaacatgttaaaaattctatagttccccagctaaagtaaagtaaagattcaatgaaatttaataaagatgttccttgtggatttgtattgacaaaccatgaaacacctggcggtttatgtccatttagtacgaaacgatactcagaatatttcaaaaaagttcccagacagtaaagtaaacacttaagtgtttcggtgaaaaccaacgtcggtaatctgttacgatttgaacccaacaacctactacgttgtctttatacaacctttatatatctgctaataaattccttaaaccatctacctttaggatattcaaatctatcttttgtatttgttaatcatgtttattttacaggtggtaatgattaatgttggttatatttaggatacgatctacgatttaatgctataaatgtgtcatcttacaatcacaaagtcaaagttttaggtaaaggtaatctattattaccattaggacatatacttaattcattacatttgacctttacaaagaaatgttcctgcaccaggtctaatttaaacctattgctgctcctgtttcttttgttacctctgcgaaagggttgcaaatttacgcacggtcttgttttatgatctgacaaaacttttttctatcatctacataacgtctagtatatcttataacctttcgacacgctgtacttttacacgatatgatatttcgttctcttttactgtaatgacatgatttggtggtctaccacggaacaaatgttcatacatttcgttttcgtacatcacgttatcttcacgtttatcgtgaccttagtaattcatgttgttatatattgttacttctcacctgtaattctctgtgtacgctccttgataccgaatgacttggattttttacgaaattttttcttcctgttgtatatcttcataccaaactaccatcatttttgttaacatacgttatacatcggacctttatatatataatgttacctctaacacccaccgtttttcacacaagaccccatctgatatctccatatataatacatgtactaccggtgttttgtatgatgtgtctgaaacttgttctccggttttttaaacccacatttttgtatacccttcatgtataccttttactctcataaataacaggactgagacacagatcatggacatctatgttgcataggggacaactttgacaattgcttatgttgtgggtgttctggtggtggtggtggaggtgcaggcacccgttggttctgcggcgtcatagggtgtctggtccttttgctgggtctgatgcccttagtcttaaactgaggaggtctctcagggtgcgtttcacacagtgttgtgtgtgtgtgtagtcgctgtgtctgttatggctgtcatcttcatcttcatagttgttgttgttggtgggaccactattctgatgcggacatcatgtaaattttccacttggattgtctaattttacaacatctatagctaaagtttttatattttgtaacaaacacctacattgtagttgtatagtaacctgttcatgtctgttatttttaatatcgtattaatgttaatatatattcctactttgtgttgctttgtcgaaaaattcagtacatttttaaggtcatcacatgtccaatcaaaccctgtttactcaaaaggtatttcacgacatatataacatatatgtaaacacaataacattgtgtgtttatgcacttcacatggacggtatgtaacgacgatgcgtatatataacgttggtaactaaaaacacaataaccacacaaacgcgaaacgaaaacacaaacaaacgaacacacagtacaacagggcgaaaacgatagacggagacacaaaaggtcaacatataataattattataacaaaaccaaacaatatcggtgtaggaaaaaattatgtaaatattataaaaactataaaaaaatgacaggacacgacacatatataaatgtacgaaacacctattatttattatacatttacatcatcatgacaatgatgataccaacgggtggcacggtgtgctgcgtttgcgcgtagacgttgtgttgatatattttgtacattcaacagaccatgtacaggtctcctacaacaattattttatctcgttttttgtacccgactattttataacgttaccccttcaaataaatgtataaaacctccggaaccgtaaccatgtccttgacccagacccccagcacgtccgatacaaggtaaccccagatccggaaggtgttatcaactacattgaggccgcgctggtggataacaacaccttaggcatcccggatgtctgggaaggtaacaatgtaatcaactcctcaggtcacaatatcttagaccacgtccctaaggattaaaatgacccagaccccctaaactttaatgtaggagtagttgttgatgtggacggcacaacctataatgtggttggagatcatgacatgtacagtcatcatgggtatattggttaggcaataaataactagggggacaataactccggggtgtttgtccgctccacagaccgttataaaattaatcgtgtgggtgtagaccatatgtatcgatacttctttatggatacgtttgtaaacgacaagtgccaagaccatgtcttggataatcatcatgaggataaggtccgaaatccgcataacgtcgaggatctaatatatcttttcgtaaagtcgtccaattccattgactgggacgtaaagaactatctggacgttgtaatcatagacgactattaggtgaaaaacttccatgactgtgtagaaatcgaaaaagaggcagcccacaccgaggactgggactaaaatacttatatcatcgtaatgtatccggacgtaaatgatgtgcatccccaccacatgcaaaatcatccgaaccgtctttccgatgatatgtttgtgcatctccgtgtgtttatccacgggcacacgtaataataatactatattcaggataacgtgtccgactcctttaactttacgtcggtaataacagacgtttattaagtaaactaccggatatactataaatacgtttatatctactacttcgtggaccaaacagatcggtcagtcaacgatgtggaagacgtgtgaatggatatttcggaaggtgtaacagaaaacgatcattgtggtgattacattgacggggaaatccattacacaccctttgtggtaaaataagtccaggactgtatcacaacggatgtccggggtcatgcaccgggaaacaaggagtcagaggaatactacaatgggtactacatatatatgtccctaggaggaaacgtaataccggacacataaaaaaatctgcatccgcggcatttgcataagggataaaaaaacgtctaccgctgcaccgccggatcacttttattccacatagatggaggttgtggacaaagtttccaacaccgttgcctaaggatacattttgcgtgatcatataaaatagtacgtccgtcaagtgctaacgaacggcatcctgtagggataatgagacactgattcctgttatggttttgtttgtaagggtttcaatcacgtatagttatatcccataaatcccatgccaacgggctgggattattcaaacccgaaggtctatgattataaatattaggcctggtccttgccaatcacacccgtacacatccaaacctccatccggcgcctgtcggaaatccacgacccgattcaccggtaggtaacaaattatccgacctactatgactttcaaggttaaatcgtttattattacaatatcttctatcatccctgttatatagtcaactaccgttcgtttgtgtcaacacataacaacctacatgagggcgatacccacttgtaacctgatttccacgacacacattcaggtgtgttcaatggtgtcccctgacgggcggagaacgtaattaattatgtggatatctcctacccctgtactatctgtgtcctaaaccgcgatacctgaaattccacaacgtccttagattccgactccatggaaatctgtaacatgttaggtggacatttataggactgataaatttttacagacgtctacggataccactaagatacaccaaaatgaatgcgtcccttgttaataaacggtctgtaataaaattatcccgaccatttcaacccctttgttatggacgtctcaatataaatttcccatcgttaccatctcttgggggaggctcaagacatatacaacgatgcggatcacccagatactaatgcagactccgtgtcaataaattatttggaataaccaacgttgcacgggttccggtattattaccgtaaacgaccccattagttaataaacaatgacatcatctatgatgatcttcatgattgtactgataatcatgacgatgtcttgtcaattcatttatactacgtgctttttaattagtcatggaatctgtacacctccttatacttaatgttaaacaaaaagttaatacgttttaatgaaacagacgtctccaataccgtataaatgtattatacttacgattggatgacctcctgaccttataacccaataggggcggtcaccggtggtcggatcttctatttatatctatacaatcttcgtgtcgatattgtacagttgcccttgtcggtggttgtctttttgtcctgggtaatcgatttatatttaaaaccctacaattgaatgtcctgtcaaaaagatgtctggacctagttaaaggtgacccatcttttaaaaattacgttgacccgtgatccagtttcggacgacatcgatggagatttttcgctagacgaggatggaggtggagatgtggtcgttttgcattttccgccatcacacaacaacacacaaacacattgacacaaacacacaacatatataccatacaaacacatacacgaaataaaatatgaaacatacacatacaacacaaacacatttacaaacacactttacaaacacacacataagtaacatacatactgacatatatacacattacaaacacacagacattatttgtacttactcacgaaaatgcgcaccaacgtatttgattccacacagtaataacaccgaaaacaaaacattcaataacacatgtcacatgatacacataacacgtatgtatatatatggtattgtatgaggtaaaacaacaaaaaggcggtaaaacatgtacgttggcttaagccaacgtaccggatcacggtaataaatttgattttccttaagccaacgtaccggatcacggtaataaatttggttttccgggaaaagtcgtcttgtcaattaggaaaccgtataacggcaaaggacacaaaatatgaacttaatacatgtcatggcgtgggacataatgagtgtccatgatactgacggttgatacgaaaatagacgtatgaaatcacgacaacccgtgtgtaaaaatatgtacacagacgttgaaaccacaaaaccgaacgtcttatgtgatacatccggttcatagacagtcatagacaaaacgtttgtacattgtatgttaatgagtaaaaaattttggcaaatgccagcacgtttttgtccaaagaaaattaacaa

SEQ ID NO: 671 - DNA, 7844 bp, Papilloma virus
utttuaaagttagtatgaaaatatataauuutuautgguttttuuuaaattutgguttttguuatgtatattttuugtugaataagauauauutgtataggtauutuggtgttaagttgttaggtgtuuttguaggtguttuggaugtggtgaautuautuuataatutttatggaaattaautagaatutaatagtauauatataaugttttttuttgattgtguaugautuuatatattaaaaugtaugtgauttaattttaatuauatatuuutautaaaaggaataugtuauaugtutuatauaaataauaaaatatuatttuaatuttttatatuuataatautgataagtuauatauutugatgtgatutttuatattgattttttgtuaatauautaaataattattuuaugatgtutauagtttuagguaattgagguutuuttttugttaaugtaauautgtutttttutgutaaagtagattatugtgtauuaauutgguuuagtauaaauuuuaugauututgtttgtagatututtggatututtagatgtuatattagtaugtauuatttuatggttgugaugttutguaauataatuttgattgtggagtttgtutttaautggatgtuaugttautugttaauutgtugagtutuutautuutautuutauttuatutggtaaaugtuutuguuggtgtugttugatutgttugatttgttgtatguauaatggattatgtguatggaauaauautuauattuaaauauuaugtuaauutgtaagtutuatggtttutuutggauguauaauatgttgtugaugaatauuuauguaattgtuattguaugggtgagaugugtagttuattgattgaugttauuguagtggauttuuatgtutauuuutuuuuttuuutauaauauutauuaaauttuatutuugttaauatutttttttttgtuututattttatagtutautautttuautgutuutuutautttatutatgtutaaatutauutaaatatutgutaagtatatatgttttatatgtuugtutgugtutttgtuagttgttaauaaugttuatgtttgtugtgtaugtutatttgtutguaaugtttttgattttgutttuatatatugatuaggtaattuuutataatuattagtugtttgauauaugguuuttuutuattttguutuugaataaaatagtutggatgttutgtuguuuatauugttatgtaauutttgagauutttgtggtuttgtuuatutauttutuuatgtuuutguauuuauguuuttatgtgttttauutuugagtgttttgtuatggatatuattgttatuautuutgagauattatgtatauutataautatutttgttautttguggttgtgttgttaaugtuutgaauaaattttuatugttaaatgttuuatttaatataatatttaaatttuttuauatauuataaggtaaaagtuttaauuauguatguaaattttuautatuatgtauaaugttautaauutatauaugatataaauuauaattautttgtaatuggutuugtgatttttgatattattttggtgtgauatauataatagtataugttauaaattgtauatgtauuuuuuaatatuattautaugattaatutatatgtauauugtttttgtutttttgttaaugttttugtaattugagttataatttauatggtgtuutugtttauaattaagttggtggtttttatguttuaggaugauatugaaatataaaaatattttgtugttauagtttataatuautauauatauututgtgtggtuttauutatgtttutgtttgtgttaaugttgtgtuaaatgtuutatuagttaaauttaatagattttauuaugtuauuugtaaautattauttuattgtutautatuggtttaauguaaagttataugtgttaatugtutauatutgtugttaugtgttuggaaaaatttttugttataugtuugttttatauatttuutaauauuttattauauatutgtaatattttuuugtgttgtugttgtttauttatauauggtuauutatttugtgtatauatuattttgtutauttuuuuuautaauutttgggtaauatgttaaaaattutatagttuuuuagutaaagtaaagtaaagattuaatgaaatttaataaagatgttuuttgtggatttgtattgauaaauuatgaaauauutgguggtttatgtuuatttagtaugaaaugatautuagaatatttuaaaaaagttuuuagauagtaaagtaaauauttaagtgtttuggtgaaaauuaaugtuggtaatutgttaugatttgaauuuaauaauutautaugttgtutttatauaauutttatatatutgutaataaattuuttaaauuatutauutttaggatattuaaatutatuttttgtatttgttaatuatgtttattttauaggtggtaatgattaatgttggttatatttaggataugatutaugatttaatgutataaatgtgtuatuttauaatuauaaagtuaaagttttaggtaaaggtaatutattattauuattaggauatatauttaattuattauatttgauutttauaaagaaatgttuutguauuaggtutaatttaaauutattgutgutuutgtttuttttgttauututgugaaagggttguaaatttauguauggtuttgttttatgatutgauaaaauttttttutatuatutauataaugtutagtatatuttataauutttugauaugutgtauttttauaugatatgatatttugttututtttautgtaatgauatgatttggtggtutauuauggaauaaatgttuatauatttugttttugtauatuaugttatuttuaugtttatugtgauuttagtaattuatgttgttatatattgttauttutuauutgtaattututgtgtaugutuuttgatauugaatgauttggattttttaugaaattttttuttuutgttgtatatuttuatauuaaautauuatuatttttgttaauataugttatauatuggauutttatatatataatgttauututaauauuuauugtttttuauauaagauuuuatutgatatutuuatatataatauatgtautauuggtgttttgtatgatgtgtutgaaauttgttutuuggttttttaaauuuauatttttgtatauuuttuatgtatauuttttaututuataaataauaggautgagauauagatuatggauatutatgttguataggggauaautttgauaattguttatgttgtgggtgttutggtggtggtggtggaggtguagguauuugttggttutguggugtuatagggtgtutggtuuttttgutgggtutgatguuuttagtuttaaautgaggaggtututuagggtgugtttuauauagtgttgtgtgtgtgtgtagtugutgtgtutgttatggutgtuatuttuatuttuatagttgttgttgttggtgggauuautattutgatguggauatuatgtaaattttuuauttggattgtutaattttauaauatutatagutaaagtttttatattttgtaauaaauauutauattgtagttgtatagtaauutgttuatgtutgttatttttaatatugtattaatgttaatatatattuutautttgtgttgutttgtugaaaaattuagtauatttttaaggtuatuauatgtuuaatuaaauuutgtttautuaaaaggtatttuaugauatatataauatatatgtaaauauaataauattgtgtgtttatguauttuauatggauggtatgtaaugaugatgugtatatataaugttggtaautaaaaauauaataauuauauaaaugugaaaugaaaauauaaauaaaugaauauauagtauaauagggugaaaaugatagauggagauauaaaaggtuaauatataataattattataauaaaauuaaauaatatuggtgtaggaaaaaattatgtaaatattataaaaautataaaaaaatgauaggauaugauauatatataaatgtaugaaauauutattatttattatauatttauatuatuatgauaatgatgatauuaaugggtgguauggtgtgutgugtttgugugtagaugttgtgttgatatattttgtauattuaauagauuatgtauaggtutuutauaauaattattttatutugttttttgtauuugautattttataaugttauuuuttuaaataaatgtataaaauutuuggaauugtaauuatgtuuttgauuuagauuuuuaguaugtuugatauaaggtaauuuuagatuuggaaggtgttatuaautauattgagguugugutggtggataauaauauuttagguatuuuggatgtutgggaaggtaauaatgtaatuaautuutuaggtuauaatatuttagauuaugtuuutaaggattaaaatgauuuagauuuuutaaautttaatgtaggagtagttgttgatgtggaugguauaauutataatgtggttggagatuatgauatgtauagtuatuatgggtatattggttagguaataaataautagggggauaataautuuggggtgtttgtuugutuuauagauugttataaaattaatugtgtgggtgtagauuatatgtatugatauttutttatggataugtttgtaaaugauaagtguuaagauuatgtuttggataatuatuatgaggataaggtuugaaatuuguataaugtugaggatutaatatatuttttugtaaagtugtuuaattuuattgautgggaugtaaagaautatutggaugttgtaatuatagaugautattaggtgaaaaauttuuatgautgtgtagaaatugaaaaagagguaguuuauauugaggautgggautaaaatauttatatuatugtaatgtatuuggaugtaaatgatgtguatuuuuauuauatguaaaatuatuugaauugtutttuugatgatatgtttgtguatutuugtgtgtttatuuauggguauaugtaataataatautatattuaggataaugtgtuugautuutttaautttaugtuggtaataauagaugtttattaagtaaautauuggatatautataaataugtttatatutautauttugtggauuaaauagatuggtuagtuaaugatgtggaagaugtgtgaatggatatttuggaaggtgtaauagaaaaugatuattgtggtgattauattgauggggaaatuuattauauauuutttgtggtaaaataagtuuaggautgtatuauaauggatgtuuggggtuatguauugggaaauaaggagtuagaggaatautauaatgggtautauatatatatgtuuutaggaggaaaugtaatauuggauauataaaaaaatutguatuugugguatttguataagggataaaaaaaugtutauugutguauuguuggatuauttttattuuauatagatggaggttgtggauaaagtttuuaauauugttguutaaggatauattttgugtgatuatataaaatagtaugtuugtuaagtgutaaugaaugguatuutgtagggataatgagauautgattuutgttatggttttgtttgtaagggtttuaatuaugtatagttatatuuuataaatuuuatguuaaugggutgggattattuaaauuugaaggtutatgattataaatattagguutggtuuttguuaatuauauuugtauauatuuaaauutuuatuugguguutgtuggaaatuuaugauuugattuauuggtaggtaauaaattatuugauutautatgautttuaaggttaaatugtttattattauaatatuttutatuatuuutgttatatagtuaautauugttugtttgtgtuaauauataauaauutauatgagggugatauuuauttgtaauutgatttuuaugauauauattuaggtgtgttuaatggtgtuuuutgauggguggagaaugtaattaattatgtggatatutuutauuuutgtautatutgtgtuutaaauugugatauutgaaattuuauaaugtuuttagattuugautuuatggaaatutgtaauatgttaggtggauatttataggautgataaatttttauagaugtutauggatauuautaagatauauuaaaatgaatgugtuuuttgttaataaauggtutgtaataaaattatuuugauuatttuaauuuutttgttatggaugtutuaatataaatttuuuatugttauuatututtgggggaggutuaagauatatauaaugatguggatuauuuagatautaatguagautuugtgtuaataaattatttggaataauuaaugttguaugggttuuggtattattauugtaaaugauuuuattagttaataaauaatgauatuatutatgatgatuttuatgattgtautgataatuatgaugatgtuttgtuaattuatttatautaugtgutttttaattagtuatggaatutgtauauutuuttatauttaatgttaaauaaaaagttaataugttttaatgaaauagaugtutuuaatauugtataaatgtattatauttaugattggatgauutuutgauuttataauuuaatagggguggtuauuggtggtuggatuttutatttatatutatauaatuttugtgtugatattgtauagttguuuttgtuggtggttgtutttttgtuutgggtaatugatttatatttaaaauuutauaattgaatgtuutgtuaaaaagatgtutggauutagttaaaggtgauuuatuttttaaaaattaugttgauuugtgatuuagtttuggaugauatugatggagatttttugutagaugaggatggaggtggagatgtggtugttttguattttuuguuatuauauaauaauauauaaauauattgauauaaauauauaauatatatauuatauaaauauatauaugaaataaaatatgaaauatauauatauaauauaaauauatttauaaauauautttauaaauauauauataagtaauatauatautgauatatatauauattauaaauauauagauattatttgtauttautuaugaaaatguguauuaaugtatttgattuuauauagtaataauauugaaaauaaaauattuaataauauatgtuauatgatauauataauaugtatgtatatatatggtattgtatgaggtaaaauaauaaaaagguggtaaaauatgtaugttgguttaaguuaaugtauuggatuauggtaataaatttgattttuuttaaguuaaugtauuggatuauggtaataaatttggttttuugggaaaagtugtuttgtuaattaggaaauugtataaugguaaaggauauaaaatatgaauttaatauatgtuatggugtgggauataatgagtgtuuatgatautgauggttgataugaaaatagaugtatgaaatuaugauaauuugtgtgtaaaaatatgtauauagaugttgaaauuauaaaauugaaugtuttatgtgatauatuuggttuatagauagtuatagauaaaaugtttgtauattgtatgttaatgagtaaaaaattttgguaaatguuaguaugtttttgtuuaaagaaaattaauaa

SEQ ID NO: 672 - DNA, 7844 bp, Papilloma virus
tttttaaagttagtatgaaaatatataatttttattggttttttttaaattttggtttttgttatgtatattttttgttgaataagatatatttgtataggtattttggtgttaagttgttaggtgtttttgtaggtgttttggatgtggtgaatttattttataatttttatggaaattaattagaatttaatagtatatatataatgtttttttttgattgtgtatgattttatatattaaaatgtatgtgatttaattttaattatatatttttattaaaaggaatatgttatatgttttatataaataataaaatattattttaattttttatatttataatattgataagttatatattttgatgtgattttttatattgattttttgttaatatattaaataattattttatgatgtttatagttttaggtaattgaggttttttttttgttaatgtaatattgtttttttttgttaaagtagattattgtgtattaatttggtttagtataaattttatgatttttgtttgtagattttttggattttttagatgttatattagtatgtattattttatggttgtgatgttttgtaatataattttgattgtggagtttgtttttaattggatgttatgttatttgttaatttgttgagttttttatttttatttttattttatttggtaaatgtttttgttggtgttgtttgatttgtttgatttgttgtatgtataatggattatgtgtatggaataatatttatatttaaatattatgttaatttgtaagttttatggttttttttggatgtataatatgttgttgatgaatatttatgtaattgttattgtatgggtgagatgtgtagtttattgattgatgttattgtagtggatttttatgtttatttttttttttttttataatatttattaaattttatttttgttaatatttttttttttgttttttattttatagtttattatttttattgttttttttattttatttatgtttaaatttatttaaatatttgttaagtatatatgttttatatgtttgtttgtgtttttgttagttgttaataatgtttatgtttgttgtgtatgtttatttgtttgtaatgtttttgattttgtttttatatattgattaggtaattttttataattattagttgtttgatatatggtttttttttattttgtttttgaataaaatagtttggatgttttgttgtttatattgttatgtaatttttgagatttttgtggttttgtttatttatttttttatgtttttgtatttatgtttttatgtgttttatttttgagtgttttgttatggatattattgttattatttttgagatattatgtatatttataattatttttgttattttgtggttgtgttgttaatgttttgaataaatttttattgttaaatgttttatttaatataatatttaaatttttttatatattataaggtaaaagttttaattatgtatgtaaatttttattattatgtataatgttattaatttatatatgatataaattataattattttgtaattggttttgtgatttttgatattattttggtgtgatatatataatagtatatgttataaattgtatatgtattttttaatattattattatgattaatttatatgtatattgtttttgtttttttgttaatgtttttgtaatttgagttataatttatatggtgtttttgtttataattaagttggtggtttttatgttttaggatgatattgaaatataaaaatattttgttgttatagtttataattattatatatatttttgtgtggttttatttatgtttttgtttgtgttaatgttgtgttaaatgttttattagttaaatttaatagattttattatgttatttgtaaattattattttattgtttattattggtttaatgtaaagttatatgtgttaattgtttatatttgttgttatgtgtttggaaaaattttttgttatatgtttgttttatatattttttaatattttattatatatttgtaatatttttttgtgttgttgttgtttatttatatatggttatttattttgtgtatatattattttgtttattttttttattaatttttgggtaatatgttaaaaattttatagttttttagttaaagtaaagtaaagatttaatgaaatttaataaagatgttttttgtggatttgtattgataaattatgaaatatttggtggtttatgtttatttagtatgaaatgatatttagaatattttaaaaaagtttttagatagtaaagtaaatatttaagtgttttggtgaaaattaatgttggtaatttgttatgatttgaatttaataatttattatgttgtttttatataatttttatatatttgttaataaattttttaaattatttatttttaggatatttaaatttattttttgtatttgttaattatgtttattttataggtggtaatgattaatgttggttatatttaggatatgatttatgatttaatgttataaatgtgttattttataattataaagttaaagttttaggtaaaggtaatttattattattattaggatatatatttaatttattatatttgatttttataaagaaatgtttttgtattaggtttaatttaaatttattgttgtttttgttttttttgttatttttgtgaaagggttgtaaatttatgtatggttttgttttatgatttgataaaatttttttttattatttatataatgtttagtatattttataattttttgatatgttgtatttttatatgatatgatattttgtttttttttattgtaatgatatgatttggtggtttattatggaataaatgtttatatattttgtttttgtatattatgttatttttatgtttattgtgattttagtaatttatgttgttatatattgttattttttatttgtaattttttgtgtatgttttttgatattgaatgatttggattttttatgaaattttttttttttgttgtatatttttatattaaattattattatttttgttaatatatgttatatattggatttttatatatataatgttatttttaatatttattgttttttatataagattttatttgatatttttatatataatatatgtattattggtgttttgtatgatgtgtttgaaatttgttttttggttttttaaatttatatttttgtatattttttatgtatattttttatttttataaataataggattgagatatagattatggatatttatgttgtataggggataattttgataattgtttatgttgtgggtgttttggtggtggtggtggaggtgtaggtatttgttggttttgtggtgttatagggtgtttggtttttttgttgggtttgatgtttttagttttaaattgaggaggttttttagggtgtgttttatatagtgttgtgtgtgtgtgtagttgttgtgtttgttatggttgttatttttatttttatagttgttgttgttggtgggattattattttgatgtggatattatgtaaattttttatttggattgtttaattttataatatttatagttaaagtttttatattttgtaataaatatttatattgtagttgtatagtaatttgtttatgtttgttatttttaatattgtattaatgttaatatatatttttattttgtgttgttttgttgaaaaatttagtatatttttaaggttattatatgtttaattaaattttgtttatttaaaaggtattttatgatatatataatatatatgtaaatataataatattgtgtgtttatgtattttatatggatggtatgtaatgatgatgtgtatatataatgttggtaattaaaaatataataattatataaatgtgaaatgaaaatataaataaatgaatatatagtataatagggtgaaaatgatagatggagatataaaaggttaatatataataattattataataaaattaaataatattggtgtaggaaaaaattatgtaaatattataaaaattataaaaaaatgataggatatgatatatatataaatgtatgaaatatttattatttattatatatttatattattatgataatgatgatattaatgggtggtatggtgtgttgtgtttgtgtgtagatgttgtgttgatatattttgtatatttaatagattatgtataggttttttataataattattttattttgttttttgtatttgattattttataatgttatttttttaaataaatgtataaaatttttggaattgtaattatgtttttgatttagatttttagtatgtttgatataaggtaattttagatttggaaggtgttattaattatattgaggttgtgttggtggataataatattttaggtattttggatgtttgggaaggtaataatgtaattaattttttaggttataatattttagattatgtttttaaggattaaaatgatttagattttttaaattttaatgtaggagtagttgttgatgtggatggtataatttataatgtggttggagattatgatatgtatagttattatgggtatattggttaggtaataaataattagggggataataattttggggtgtttgtttgttttatagattgttataaaattaattgtgtgggtgtagattatatgtattgatatttttttatggatatgtttgtaaatgataagtgttaagattatgttttggataattattatgaggataaggtttgaaatttgtataatgttgaggatttaatatatttttttgtaaagttgtttaattttattgattgggatgtaaagaattatttggatgttgtaattatagatgattattaggtgaaaaatttttatgattgtgtagaaattgaaaaagaggtagtttatattgaggattgggattaaaatatttatattattgtaatgtatttggatgtaaatgatgtgtatttttattatatgtaaaattatttgaattgtttttttgatgatatgtttgtgtatttttgtgtgtttatttatgggtatatgtaataataatattatatttaggataatgtgtttgatttttttaattttatgttggtaataatagatgtttattaagtaaattattggatatattataaatatgtttatatttattattttgtggattaaatagattggttagttaatgatgtggaagatgtgtgaatggatattttggaaggtgtaatagaaaatgattattgtggtgattatattgatggggaaatttattatatattttttgtggtaaaataagtttaggattgtattataatggatgtttggggttatgtattgggaaataaggagttagaggaatattataatgggtattatatatatatgtttttaggaggaaatgtaatattggatatataaaaaaatttgtatttgtggtatttgtataagggataaaaaaatgtttattgttgtattgttggattatttttattttatatagatggaggttgtggataaagtttttaatattgttgtttaaggatatattttgtgtgattatataaaatagtatgtttgttaagtgttaatgaatggtattttgtagggataatgagatattgatttttgttatggttttgtttgtaagggttttaattatgtatagttatattttataaattttatgttaatgggttgggattatttaaatttgaaggtttatgattataaatattaggtttggtttttgttaattatatttgtatatatttaaatttttatttggtgtttgttggaaatttatgatttgatttattggtaggtaataaattatttgatttattatgatttttaaggttaaattgtttattattataatattttttattatttttgttatatagttaattattgtttgtttgtgttaatatataataatttatatgagggtgatatttatttgtaatttgatttttatgatatatatttaggtgtgtttaatggtgttttttgatgggtggagaatgtaattaattatgtggatattttttatttttgtattatttgtgttttaaattgtgatatttgaaattttataatgtttttagattttgattttatggaaatttgtaatatgttaggtggatatttataggattgataaatttttatagatgtttatggatattattaagatatattaaaatgaatgtgttttttgttaataaatggtttgtaataaaattattttgattattttaatttttttgttatggatgttttaatataaattttttattgttattattttttgggggaggtttaagatatatataatgatgtggattatttagatattaatgtagattttgtgttaataaattatttggaataattaatgttgtatgggttttggtattattattgtaaatgattttattagttaataaataatgatattatttatgatgatttttatgattgtattgataattatgatgatgttttgttaatttatttatattatgtgttttttaattagttatggaatttgtatatttttttatatttaatgttaaataaaaagttaatatgttttaatgaaatagatgtttttaatattgtataaatgtattatatttatgattggatgattttttgattttataatttaataggggtggttattggtggttggattttttatttatatttatataatttttgtgttgatattgtatagttgtttttgttggtggttgtttttttgttttgggtaattgatttatatttaaaattttataattgaatgttttgttaaaaagatgtttggatttagttaaaggtgatttattttttaaaaattatgttgatttgtgatttagttttggatgatattgatggagattttttgttagatgaggatggaggtggagatgtggttgttttgtattttttgttattatataataatatataaatatattgatataaatatataatatatatattatataaatatatatatgaaataaaatatgaaatatatatatataatataaatatatttataaatatattttataaatatatatataagtaatatatatattgatatatatatatattataaatatatagatattatttgtatttatttatgaaaatgtgtattaatgtatttgattttatatagtaataatattgaaaataaaatatttaataatatatgttatatgatatatataatatgtatgtatatatatggtattgtatgaggtaaaataataaaaaggtggtaaaatatgtatgttggtttaagttaatgtattggattatggtaataaatttgattttttttaagttaatgtattggattatggtaataaatttggttttttgggaaaagttgttttgttaattaggaaattgtataatggtaaaggatataaaatatgaatttaatatatgttatggtgtgggatataatgagtgtttatgatattgatggttgatatgaaaatagatgtatgaaattatgataatttgtgtgtaaaaatatgtatatagatgttgaaattataaaattgaatgttttatgtgatatatttggtttatagatagttatagataaaatgtttgtatattgtatgttaatgagtaaaaaattttggtaaatgttagtatgtttttgtttaaagaaaattaataa

SEQ ID NO: 673 - DNA, 7824 bp, Papilloma virus
ctaaactataatgccaaatcttgtaaaaactagggtgtaaccgaaaacggtctgaccgaaaccggtgcatatataaagcagacattttttggtaggctactgcaggactatgttccaggacgcagaggagaaaccacggacattgcatgatttgtgtcaggcgttggagacatctgtgcatgaaatcgaattgaaatgcgttgaatgcaaaaagactttgcagcgatctgaggtatatgactttgtatttgcagatttaagaatagtgtatagagatggaaatccatttgcagtatgtaaagtgtgcttacgattgctatctaaaataagtgagtatagacattataattattcgctatatggagacacattagaacaaacactaaaaaagtgtttaaatgaaatattaattagatgtattatttgtcaaagaccattgtgtccacaagaaaaaaaaaggcatgtggatttaaacaaaaggtttcataatatttcgggtcgttggacagggcgctgtgcagtgtgttggagaccccgacgtagacaaacacaagtgtaacctgtaacaacgccatgagaggaaacaacccaacgctaagagaatatattttagatttacatcctgaaccaactgacctattctgctatgagcaattatgtgacagctcagacgaggatgaaataggcttggacgggccagatggacaagcacaaccggccacagctaattactacattgtaacttgttgttacacttgtggcaccacggttcgtttgtgtatcaacagtacaacaaccgacgtacgaaccctacagcagctgcttatgggcacatgtaccattgtgtgccctagctgtgcacagcaataaacaccatctgcaatggatgaccctgaaggtacaaacggggtaggggcgggctgtactggctggtttgaggtagaagcggtaatagaacgaagaacaggagataatatttcagatgatgaggacgaaacagcagacgatagtggtacagatttaatagagtttatagatgattcagtacaaagtactacacaggcagaagcagaggcagcccgagcgttgtttaatgtacaggaaggggtggacgatataaatgctgtgtgtgcactaaaacgaaagtttgcagcatgctcagaaagtgctgtagaggactgtgtggaccgggctgcaaatgtgtgtgtatcgtggaaatataaaaataaagaatgcacacacagaaaacgaaaaattattgagctagaagacagcggatatggcaatactgaagtggaaactgagcagatggcacaccaggtagaaagccaaaatggcgacgcagacttaaatgactcggagtctagtggggtgggggctagttcagatgtaagcagtgaaacggatgtagacagttgtaatactgttccattacaaaatattagtaatattctacataacagtaatactaaagcaacgctattatataaattcaaagaagcttatggagtaagttttatggaattagttagaccatttaaaagtgataaaacaagctgtacagattggtgtataacagggtatggaataagtccctccgtagcagaaagtttaaaagtactaattaaacagcacagtatatatacacacctacaatgtttaacgtgtgacagaggaattatattattattgttaattagatttaaatgtagcaaaaatagattaactgtggcaaaattaatgagtaatttactatcaattcctgaaacatgtatgattatcgagccaccaaaattacgaagtcaagcatgtgccttatattggtttagaacagcaatgtcaaatataagtgatgtgcaagggacaacaccagaatggatagatagattaacagtgttacagcatagctttaatgatgatatatttgatttaagtgaaatgatacaatgggcatatgataatgacattacagatgatagtgacattgcatataaatatgcacagttagcagatgttaatagtaatgcagcagcatttttaagaagcaatgcacaagcaaaaatagtaaaagactgtggcgttatgtgcagacattataaaagagcagaaaagcgtggtatgacaatgggacaatggatacaaagtaggtgtgaaaaaacaaatgatggaggtaattggagaccaatagtacaatttttaagatatcaaaatattgaatttacagcatttttagttgcatttaaacagtttttacaaggtgtaccaaaaaaaagttgtatgttactgtgtggcccagcaaatacagggaaatcatattttggaatgagtttaatacattttttaaaaggatgcattatttcatatgtaaattccaaaagtcatttttggttgcagccattatcagatgctaaactaggtatgatagatgatgtaacagccataagctggacatatatagatgattatatgagaaatgcattagatggtaacgacatttcaatagatgtaaaacatagggcattagtacaattaaaatgtccaccattaataattacctcaaatacaaatgcaggcaaagattcacgatggccatatttgcacagtagactaacagtatttgaatttaacaatccatttccatttgatgcaaatggtaatccagtgtataaaataaatgatgaaaattggaaatcctttttctcaaggacgtggtgcaaattaggcttaatagaggaagaggacaaggaaaacgatggaggaaatatcagcacgtttaagtgcagtgcaggacaaaatcctagacatatacgaagctgataaaaatgatttaacatcacaaattgaacattggaaactaatacgcatggagtgtgctataatgtatacagccagacaaatgggaatatcacatttgtgccaccaggtggtgccgtcattggtagcatcaaagactaaagcgtttcaagtaattgaactgcaaatggcattagagacattaaatgcatcaccatataaaacagatgaatggacattgcaacaaacaagcttagaagtgtggttatcagagccacaaaaatgctttaaaaaaaaaggcataacagtaactgtacaatatgacaatgataaagcaaacacaatggattatacaaattggagtgaaatatatattattgaggaaacaacatgtactttggtagcaggagaagttgactatgtggggttgtattatatacatggcaatgaaaagacgtattttaaatattttaaagaggatgcaaaaaagtactctaaaacacaattatgggaggtacatgtgggtagtcgggtaattgtatgtcctacatctatacctagtgatcaaatatccactactgaaactgctgacccaaagaccaccgaggccaccaacaacgaaagtacacaggggacaaagcgacgacgactcgatttaccagactccagagacaacacccagtactccacaaagtatacagactgcgccgtggacagtagaccacgaggaggaggactacacagtacaactaactgtacatacaaagggcggaacgtgtgtagttctaaagtttcacctatcgtgcatttaaaaggtgacccaaatagtttaaaatgtttaagatatagattaaaaccatttaaagacttatactgtaatatgtcatccacatggcattggaccagtgatgacaaaggtgacaaagtaggaattgttactgtaacatacacaacggaaacacaacgacaactgtttttaaacactgttaaaataccacccactgtgcaaataagtactggtgttatgtcattgtaattgtattgtacaattactgtatgtaaaccacaagccaatatgtgctgctaagtgtatatacaatgatattacctatttttgttgtttgttttatactgtttttatgcttgtgcatttttttgcggccattggtgctatctatttctatatatgcttggttgctggtgttggtgttgctgctttgggtgtctgtggggtcggctctacgaatttttttctgttacttaatatttttatatataccaatgatgtgtattaattttcatgcacaatacttaacccaacaagactaactgtatactggttctgcacatggtggtatggtattgtaaatatttactgttgtgtgtgttgtttttattatttttatacatttactaataaatacttttatatttttagcactgtcttattatgagacacaaacggtctacaaggcgcaagcgtgcatctgctacacaactttaccaaacatgcaaggcctcaggcacctgcccacctgatgttatacccaaagttgaaggcactactatagcagatcaaatattacgatatggtagcttaggggtgttttttggaggtttaggcattggtacagggtcgggtacaggtggcaggactggatatgtgccccttggtagtaccccaccgtctgaggctatacctttacagcccatacgtcccccagttaccgttgatactgtggggcctttggattcttctattgtatctttaatagaggaatctagttttatagacgccggtgcaccagccccatcaattcccactccatctggttttgatattaccacctctgcagatactacacctgcaatacttaatgtttcctctattggagaatcatctatacaaactgtttctacacatttaaatccctcctttactgagccatccgtactccgccctcctgcacctgcagaggcctctggacatttaatattttcctctcctactgttagcacacatagttatgaaaacataccaatggatacctttgttatttctactgacagtggcaatgtcacgtctagcacacccattccagggtctcgccctgtggcacgccttggtttatacagtcgcaacacccaacaagttaaggttgttgaccctgcttttttaacatctcctcatagacttgtaacatatgataatccagcatttgaaggctttaaccctgaggacacattgcagtttcaacatagtgacatatcgcctgctcctgatcctgattttctagatattgttgcattacacagacctgcattaacctctcgcaggggtactgtacgttatagtagggttgggcaaaaggctacacttcgtactcgcagtggaaagcaaataggggctaaagtacattactaccaagacttaagtcccatacagcctgtccaggaacaggtacaacagcagcaacaatttgaattacaatctttaaatacttctgtttctccctatagtattaatgatggactttatgatatttatgctgacgatgctgatactatacatgattttcagagtcctctgcactcacatacgtcctttgccaccacacgtaccagtaatgtgtccataccattaaatactggatttgacactcctcttgtgtcattggaacctggtccagacattgcatcttctgtaacatctatgtctagtccatttattcctatatctccactaactccttttaataccataattgtggatggtgctgattttatgttgcaccctagctattttattttgcgtcgcagacgtaaacgttttccatatttttttgcagatgtccgtgtggcggcctagtgaggccactgtgtacctgcctcctgtgcctgtgtctaaggttgtaagcactgatgaatatgtgtcacgcacaagcatttattattatgctggcagttccagacttttggctgttggcaatccatatttttccatcaaaagtcccaataacaataaaaaagtattagttcccaaggtatcaggcttacagtatagggtctttagggtgcgtttacctgatcccaataaatttggttttcctgatacatctttttataaccctgatacacaacgtttggtctgggcatgtgtaggccttgaaataggtaggggacagccattgggtgttggcgtaagtggtcatccttatttaaataaatttgatgacactgaaaccagtaacagatatcccgcacagccagggtctgataacagggaatgcttatctatggattataaacaaacacaattatgtttaattggctgtaaacctcccactggtgagcattggggtaaaggtgttgcctgtaacaataatgcagctgctactgattgtcctccattggaactttttaattctattattgaggatggtgacatggtagatacagggtttggatgcatggactttggtacattgcaggctaataaaagtgatgtgcctattgatatttgtaacagtacatgcaaatatccagattatttaaaaatggccagtgaaccttatggggatagtttgttcttttttcttagacgtgagcagatgtttgttagacacttttttaatagggctggaaaacttggcgaggctgtcccggatgacctttatattaaagggtccggtaatactgcagttatccaaagtagtgcattttttccaactcctagtggctctatagttacctcagaatcacaattatttaataagccttattggctacagcgtgcacaaggtcataacaatggcatttgctggggcaatcagttatttgttaccgtggttgataccactcgtagcactaatatgacattatgcactgaagtaactaaggaaggtacatataaaaatgataattttaaggaatatgtacgtcatgttgaagaatatgacttacagtttgtttttcagctttgcaaaattacactaactgcagagataatgacatatatacatactatggattccaatattttggaggactggcaatttggtttaacacctcctccgtctgccagtttacaggacacatatagatttgttacctcccaggctattacttgccaaaaaacagcaccccctaaagaaaaggaagatccattaaataaatatactttttgggaggttaacttaaaggaaaagttttctgcagatctagatcagtttcctttgggacgaaagtttttattacaatcaggccttaaagcaaagcccagactaaaacgttcggcccctactacccgtgcaccatccaccaaacgcaaaaaggttaaaaaataattgttgtggtacttacactattttattatacatgtttgtttgttttatgtatgtgttgtctgtttgtttatgtttgtgtatatgttgtatgtgttatgtgtcatgtttgtgtacatgttctatgtccttgtcagtttcctgtttctgtatatatgtaataaactattgtgtgtattgtaaactatttgtattgtttgggtgtatctatgagtaaggtgctgtccctaaattgccctaccctgccctgcctattatgcatacctatgtaatagtatttgtatgatatgtattttatagtttttaacagtactgcctccattttactttacctccattttgtgcatgtaaccgatttcggttgctggcacaaacgtgttttttttaaactacaatttaaacaatacagttaatcctttcccttcctgcactgcttttgcctatacttgcatatgtgactcatatatacatgcagtgcagttgcaaaatgtttaattatactcatagtttaaacatgcttataggcacatattttaacttactttcaatgcttaagtgcagttttggcttgcacaatagtttgttatgccaaactatgtcttgtaaaagtgactcactaacatttattgccaggtgtggactaaccgttttgggtcacattgttcatgtttcaacattttatataata

SEQ ID NO: 674 - DNA, 7824 bp, Papilloma virus
utaaautataatguuaaatuttgtaaaaautagggtgtaauugaaaauggtutgauugaaauuggtguatatataaaguagauattttttggtaggutautguaggautatgttuuaggauguagaggagaaauuauggauattguatgatttgtgtuaggugttggagauatutgtguatgaaatugaattgaaatgugttgaatguaaaaagautttguagugatutgaggtatatgautttgtatttguagatttaagaatagtgtatagagatggaaatuuatttguagtatgtaaagtgtguttaugattgutatutaaaataagtgagtatagauattataattattugutatatggagauauattagaauaaauautaaaaaagtgtttaaatgaaatattaattagatgtattatttgtuaaagauuattgtgtuuauaagaaaaaaaaagguatgtggatttaaauaaaaggtttuataatatttugggtugttggauagggugutgtguagtgtgttggagauuuugaugtagauaaauauaagtgtaauutgtaauaauguuatgagaggaaauaauuuaaugutaagagaatatattttagatttauatuutgaauuaautgauutattutgutatgaguaattatgtgauagutuagaugaggatgaaatagguttggauggguuagatggauaaguauaauugguuauagutaattautauattgtaauttgttgttauauttgtgguauuauggttugtttgtgtatuaauagtauaauaauugaugtaugaauuutauaguagutguttatggguauatgtauuattgtgtguuutagutgtguauaguaataaauauuatutguaatggatgauuutgaaggtauaaauggggtaggggugggutgtautggutggtttgaggtagaaguggtaatagaaugaagaauaggagataatatttuagatgatgaggaugaaauaguagaugatagtggtauagatttaatagagtttatagatgattuagtauaaagtautauauagguagaaguagagguaguuugagugttgtttaatgtauaggaaggggtggaugatataaatgutgtgtgtguautaaaaugaaagtttguaguatgutuagaaagtgutgtagaggautgtgtggauugggutguaaatgtgtgtgtatugtggaaatataaaaataaagaatguauauauagaaaaugaaaaattattgagutagaagauaguggatatgguaatautgaagtggaaautgaguagatgguauauuaggtagaaaguuaaaatggugauguagauttaaatgautuggagtutagtggggtgggggutagttuagatgtaaguagtgaaauggatgtagauagttgtaatautgttuuattauaaaatattagtaatattutauataauagtaatautaaaguaaugutattatataaattuaaagaaguttatggagtaagttttatggaattagttagauuatttaaaagtgataaaauaagutgtauagattggtgtataauagggtatggaataagtuuutuugtaguagaaagtttaaaagtautaattaaauaguauagtatatatauauauutauaatgtttaaugtgtgauagaggaattatattattattgttaattagatttaaatgtaguaaaaatagattaautgtgguaaaattaatgagtaatttautatuaattuutgaaauatgtatgattatugaguuauuaaaattaugaagtuaaguatgtguuttatattggtttagaauaguaatgtuaaatataagtgatgtguaagggauaauauuagaatggatagatagattaauagtgttauaguatagutttaatgatgatatatttgatttaagtgaaatgatauaatggguatatgataatgauattauagatgatagtgauattguatataaatatguauagttaguagatgttaatagtaatguaguaguatttttaagaaguaatguauaaguaaaaatagtaaaagautgtggugttatgtguagauattataaaagaguagaaaagugtggtatgauaatgggauaatggatauaaagtaggtgtgaaaaaauaaatgatggaggtaattggagauuaatagtauaatttttaagatatuaaaatattgaatttauaguatttttagttguatttaaauagtttttauaaggtgtauuaaaaaaaagttgtatgttautgtgtgguuuaguaaatauagggaaatuatattttggaatgagtttaatauattttttaaaaggatguattatttuatatgtaaattuuaaaagtuatttttggttguaguuattatuagatgutaaautaggtatgatagatgatgtaauaguuataagutggauatatatagatgattatatgagaaatguattagatggtaaugauatttuaatagatgtaaaauataggguattagtauaattaaaatgtuuauuattaataattauutuaaatauaaatguagguaaagattuaugatgguuatatttguauagtagautaauagtatttgaatttaauaatuuatttuuatttgatguaaatggtaatuuagtgtataaaataaatgatgaaaattggaaatuutttttutuaaggaugtggtguaaattagguttaatagaggaagaggauaaggaaaaugatggaggaaatatuaguaugtttaagtguagtguaggauaaaatuutagauatataugaagutgataaaaatgatttaauatuauaaattgaauattggaaautaatauguatggagtgtgutataatgtatauaguuagauaaatgggaatatuauatttgtguuauuaggtggtguugtuattggtaguatuaaagautaaagugtttuaagtaattgaautguaaatgguattagagauattaaatguatuauuatataaaauagatgaatggauattguaauaaauaaguttagaagtgtggttatuagaguuauaaaaatgutttaaaaaaaaagguataauagtaautgtauaatatgauaatgataaaguaaauauaatggattatauaaattggagtgaaatatatattattgaggaaauaauatgtautttggtaguaggagaagttgautatgtggggttgtattatatauatgguaatgaaaagaugtattttaaatattttaaagaggatguaaaaaagtaututaaaauauaattatgggaggtauatgtgggtagtugggtaattgtatgtuutauatutatauutagtgatuaaatatuuautautgaaautgutgauuuaaagauuauugagguuauuaauaaugaaagtauauaggggauaaagugaugaugautugatttauuagautuuagagauaauauuuagtautuuauaaagtatauagautguguugtggauagtagauuaugaggaggaggautauauagtauaautaautgtauatauaaaggguggaaugtgtgtagttutaaagtttuauutatugtguatttaaaaggtgauuuaaatagtttaaaatgtttaagatatagattaaaauuatttaaagauttatautgtaatatgtuatuuauatgguattggauuagtgatgauaaaggtgauaaagtaggaattgttautgtaauatauauaauggaaauauaaugauaautgtttttaaauautgttaaaatauuauuuautgtguaaataagtautggtgttatgtuattgtaattgtattgtauaattautgtatgtaaauuauaaguuaatatgtgutgutaagtgtatatauaatgatattauutatttttgttgtttgttttatautgtttttatguttgtguatttttttgugguuattggtgutatutatttutatatatguttggttgutggtgttggtgttgutgutttgggtgtutgtggggtuggututaugaatttttttutgttauttaatatttttatatatauuaatgatgtgtattaattttuatguauaatauttaauuuaauaagautaautgtatautggttutguauatggtggtatggtattgtaaatatttautgttgtgtgtgttgtttttattatttttatauatttautaataaatauttttatatttttaguautgtuttattatgagauauaaauggtutauaagguguaagugtguatutgutauauaautttauuaaauatguaagguutuagguauutguuuauutgatgttatauuuaaagttgaagguautautataguagatuaaatattaugatatggtaguttaggggtgttttttggaggtttagguattggtauagggtugggtauaggtgguaggautggatatgtguuuuttggtagtauuuuauugtutgaggutatauutttauaguuuataugtuuuuuagttauugttgatautgtgggguutttggattuttutattgtatutttaatagaggaatutagttttatagauguuggtguauuaguuuuatuaattuuuautuuatutggttttgatattauuauututguagatautauauutguaatauttaatgtttuututattggagaatuatutatauaaautgtttutauauatttaaatuuutuutttautgaguuatuugtautuuguuutuutguauutguagagguututggauatttaatattttuututuutautgttaguauauatagttatgaaaauatauuaatggatauutttgttatttutautgauagtgguaatgtuaugtutaguauauuuattuuagggtutuguuutgtgguauguuttggtttatauagtuguaauauuuaauaagttaaggttgttgauuutguttttttaauatutuutuatagauttgtaauatatgataatuuaguatttgaaggutttaauuutgaggauauattguagtttuaauatagtgauatatuguutgutuutgatuutgattttutagatattgttguattauauagauutguattaauututuguaggggtautgtaugttatagtagggttggguaaaaggutauauttugtautuguagtggaaaguaaataggggutaaagtauattautauuaagauttaagtuuuatauaguutgtuuaggaauaggtauaauaguaguaauaatttgaattauaatutttaaatauttutgtttutuuutatagtattaatgatggautttatgatatttatgutgaugatgutgatautatauatgattttuagagtuututguautuauataugtuutttguuauuauaugtauuagtaatgtgtuuatauuattaaatautggatttgauautuututtgtgtuattggaauutggtuuagauattguatuttutgtaauatutatgtutagtuuatttattuutatatutuuautaautuuttttaatauuataattgtggatggtgutgattttatgttguauuutagutattttattttgugtuguagaugtaaaugttttuuatatttttttguagatgtuugtgtggugguutagtgagguuautgtgtauutguutuutgtguutgtgtutaaggttgtaaguautgatgaatatgtgtuauguauaaguatttattattatgutgguagttuuagauttttggutgttgguaatuuatatttttuuatuaaaagtuuuaataauaataaaaaagtattagttuuuaaggtatuagguttauagtatagggtutttagggtgugtttauutgatuuuaataaatttggttttuutgatauatutttttataauuutgatauauaaugtttggtutggguatgtgtagguuttgaaataggtaggggauaguuattgggtgttggugtaagtggtuatuuttatttaaataaatttgatgauautgaaauuagtaauagatatuuuguauaguuagggtutgataauagggaatguttatutatggattataaauaaauauaattatgtttaattggutgtaaauutuuuautggtgaguattggggtaaaggtgttguutgtaauaataatguagutgutautgattgtuutuuattggaautttttaattutattattgaggatggtgauatggtagatauagggtttggatguatggautttggtauattguaggutaataaaagtgatgtguutattgatatttgtaauagtauatguaaatatuuagattatttaaaaatgguuagtgaauuttatggggatagtttgttuttttttuttagaugtgaguagatgtttgttagauauttttttaatagggutggaaaauttggugaggutgtuuuggatgauutttatattaaagggtuuggtaatautguagttatuuaaagtagtguattttttuuaautuutagtggututatagttauutuagaatuauaattatttaataaguuttattggutauagugtguauaaggtuataauaatgguatttgutgggguaatuagttatttgttauugtggttgatauuautugtaguautaatatgauattatguautgaagtaautaaggaaggtauatataaaaatgataattttaaggaatatgtaugtuatgttgaagaatatgauttauagtttgtttttuagutttguaaaattauautaautguagagataatgauatatatauatautatggattuuaatattttggaggautgguaatttggtttaauauutuutuugtutguuagtttauaggauauatatagatttgttauutuuuaggutattauttguuaaaaaauaguauuuuutaaagaaaaggaagatuuattaaataaatatautttttgggaggttaauttaaaggaaaagttttutguagatutagatuagtttuutttgggaugaaagtttttattauaatuagguuttaaaguaaaguuuagautaaaaugttugguuuutautauuugtguauuatuuauuaaauguaaaaaggttaaaaaataattgttgtggtauttauautattttattatauatgtttgtttgttttatgtatgtgttgtutgtttgtttatgtttgtgtatatgttgtatgtgttatgtgtuatgtttgtgtauatgttutatgtuuttgtuagtttuutgtttutgtatatatgtaataaautattgtgtgtattgtaaautatttgtattgtttgggtgtatutatgagtaaggtgutgtuuutaaattguuutauuutguuutguutattatguatauutatgtaatagtatttgtatgatatgtattttatagtttttaauagtautguutuuattttautttauutuuattttgtguatgtaauugatttuggttgutgguauaaaugtgttttttttaaautauaatttaaauaatauagttaatuutttuuuttuutguautguttttguutatauttguatatgtgautuatatatauatguagtguagttguaaaatgtttaattatautuatagtttaaauatguttatagguauatattttaauttautttuaatguttaagtguagttttgguttguauaatagtttgttatguuaaautatgtuttgtaaaagtgautuautaauatttattguuaggtgtggautaauugttttgggtuauattgttuatgtttuaauattttatataata

SEQ ID NO: 675 - DNA, 7824 bp, Papilloma virus
ttaaattataatgttaaattttgtaaaaattagggtgtaattgaaaatggtttgattgaaattggtgtatatataaagtagatattttttggtaggttattgtaggattatgttttaggatgtagaggagaaattatggatattgtatgatttgtgttaggtgttggagatatttgtgtatgaaattgaattgaaatgtgttgaatgtaaaaagattttgtagtgatttgaggtatatgattttgtatttgtagatttaagaatagtgtatagagatggaaatttatttgtagtatgtaaagtgtgtttatgattgttatttaaaataagtgagtatagatattataattatttgttatatggagatatattagaataaatattaaaaaagtgtttaaatgaaatattaattagatgtattatttgttaaagattattgtgtttataagaaaaaaaaaggtatgtggatttaaataaaaggttttataatattttgggttgttggatagggtgttgtgtagtgtgttggagattttgatgtagataaatataagtgtaatttgtaataatgttatgagaggaaataatttaatgttaagagaatatattttagatttatattttgaattaattgatttattttgttatgagtaattatgtgatagtttagatgaggatgaaataggtttggatgggttagatggataagtataattggttatagttaattattatattgtaatttgttgttatatttgtggtattatggtttgtttgtgtattaatagtataataattgatgtatgaattttatagtagttgtttatgggtatatgtattattgtgtgttttagttgtgtatagtaataaatattatttgtaatggatgattttgaaggtataaatggggtaggggtgggttgtattggttggtttgaggtagaagtggtaatagaatgaagaataggagataatattttagatgatgaggatgaaatagtagatgatagtggtatagatttaatagagtttatagatgatttagtataaagtattatataggtagaagtagaggtagtttgagtgttgtttaatgtataggaaggggtggatgatataaatgttgtgtgtgtattaaaatgaaagtttgtagtatgtttagaaagtgttgtagaggattgtgtggattgggttgtaaatgtgtgtgtattgtggaaatataaaaataaagaatgtatatatagaaaatgaaaaattattgagttagaagatagtggatatggtaatattgaagtggaaattgagtagatggtatattaggtagaaagttaaaatggtgatgtagatttaaatgatttggagtttagtggggtgggggttagtttagatgtaagtagtgaaatggatgtagatagttgtaatattgttttattataaaatattagtaatattttatataatagtaatattaaagtaatgttattatataaatttaaagaagtttatggagtaagttttatggaattagttagattatttaaaagtgataaaataagttgtatagattggtgtataatagggtatggaataagtttttttgtagtagaaagtttaaaagtattaattaaatagtatagtatatatatatatttataatgtttaatgtgtgatagaggaattatattattattgttaattagatttaaatgtagtaaaaatagattaattgtggtaaaattaatgagtaatttattattaatttttgaaatatgtatgattattgagttattaaaattatgaagttaagtatgtgttttatattggtttagaatagtaatgttaaatataagtgatgtgtaagggataatattagaatggatagatagattaatagtgttatagtatagttttaatgatgatatatttgatttaagtgaaatgatataatgggtatatgataatgatattatagatgatagtgatattgtatataaatatgtatagttagtagatgttaatagtaatgtagtagtatttttaagaagtaatgtataagtaaaaatagtaaaagattgtggtgttatgtgtagatattataaaagagtagaaaagtgtggtatgataatgggataatggatataaagtaggtgtgaaaaaataaatgatggaggtaattggagattaatagtataatttttaagatattaaaatattgaatttatagtatttttagttgtatttaaatagtttttataaggtgtattaaaaaaaagttgtatgttattgtgtggtttagtaaatatagggaaattatattttggaatgagtttaatatattttttaaaaggatgtattattttatatgtaaattttaaaagttatttttggttgtagttattattagatgttaaattaggtatgatagatgatgtaatagttataagttggatatatatagatgattatatgagaaatgtattagatggtaatgatattttaatagatgtaaaatatagggtattagtataattaaaatgtttattattaataattattttaaatataaatgtaggtaaagatttatgatggttatatttgtatagtagattaatagtatttgaatttaataatttatttttatttgatgtaaatggtaatttagtgtataaaataaatgatgaaaattggaaatttttttttttaaggatgtggtgtaaattaggtttaatagaggaagaggataaggaaaatgatggaggaaatattagtatgtttaagtgtagtgtaggataaaattttagatatatatgaagttgataaaaatgatttaatattataaattgaatattggaaattaatatgtatggagtgtgttataatgtatatagttagataaatgggaatattatatttgtgttattaggtggtgttgttattggtagtattaaagattaaagtgttttaagtaattgaattgtaaatggtattagagatattaaatgtattattatataaaatagatgaatggatattgtaataaataagtttagaagtgtggttattagagttataaaaatgttttaaaaaaaaaggtataatagtaattgtataatatgataatgataaagtaaatataatggattatataaattggagtgaaatatatattattgaggaaataatatgtattttggtagtaggagaagttgattatgtggggttgtattatatatatggtaatgaaaagatgtattttaaatattttaaagaggatgtaaaaaagtattttaaaatataattatgggaggtatatgtgggtagttgggtaattgtatgttttatatttatatttagtgattaaatatttattattgaaattgttgatttaaagattattgaggttattaataatgaaagtatataggggataaagtgatgatgatttgatttattagattttagagataatatttagtattttataaagtatatagattgtgttgtggatagtagattatgaggaggaggattatatagtataattaattgtatatataaagggtggaatgtgtgtagttttaaagttttatttattgtgtatttaaaaggtgatttaaatagtttaaaatgtttaagatatagattaaaattatttaaagatttatattgtaatatgttatttatatggtattggattagtgatgataaaggtgataaagtaggaattgttattgtaatatatataatggaaatataatgataattgtttttaaatattgttaaaatattatttattgtgtaaataagtattggtgttatgttattgtaattgtattgtataattattgtatgtaaattataagttaatatgtgttgttaagtgtatatataatgatattatttatttttgttgtttgttttatattgtttttatgtttgtgtatttttttgtggttattggtgttatttatttttatatatgtttggttgttggtgttggtgttgttgttttgggtgtttgtggggttggttttatgaatttttttttgttatttaatatttttatatatattaatgatgtgtattaatttttatgtataatatttaatttaataagattaattgtatattggttttgtatatggtggtatggtattgtaaatatttattgttgtgtgtgttgtttttattatttttatatatttattaataaatatttttatatttttagtattgttttattatgagatataaatggtttataaggtgtaagtgtgtatttgttatataattttattaaatatgtaaggttttaggtatttgtttatttgatgttatatttaaagttgaaggtattattatagtagattaaatattatgatatggtagtttaggggtgttttttggaggtttaggtattggtatagggttgggtataggtggtaggattggatatgtgttttttggtagtattttattgtttgaggttatatttttatagtttatatgttttttagttattgttgatattgtggggtttttggatttttttattgtatttttaatagaggaatttagttttatagatgttggtgtattagttttattaatttttattttatttggttttgatattattatttttgtagatattatatttgtaatatttaatgttttttttattggagaattatttatataaattgtttttatatatttaaattttttttttattgagttatttgtattttgtttttttgtatttgtagaggtttttggatatttaatattttttttttttattgttagtatatatagttatgaaaatatattaatggatatttttgttatttttattgatagtggtaatgttatgtttagtatatttattttagggttttgttttgtggtatgttttggtttatatagttgtaatatttaataagttaaggttgttgattttgtttttttaatatttttttatagatttgtaatatatgataatttagtatttgaaggttttaattttgaggatatattgtagttttaatatagtgatatattgtttgtttttgattttgattttttagatattgttgtattatatagatttgtattaattttttgtaggggtattgtatgttatagtagggttgggtaaaaggttatattttgtatttgtagtggaaagtaaataggggttaaagtatattattattaagatttaagttttatatagtttgtttaggaataggtataatagtagtaataatttgaattataatttttaaatatttttgtttttttttatagtattaatgatggattttatgatatttatgttgatgatgttgatattatatatgatttttagagttttttgtatttatatatgttttttgttattatatgtattagtaatgtgtttatattattaaatattggatttgatattttttttgtgttattggaatttggtttagatattgtattttttgtaatatttatgtttagtttatttatttttatatttttattaattttttttaatattataattgtggatggtgttgattttatgttgtattttagttattttattttgtgttgtagatgtaaatgttttttatatttttttgtagatgtttgtgtggtggtttagtgaggttattgtgtatttgttttttgtgtttgtgtttaaggttgtaagtattgatgaatatgtgttatgtataagtatttattattatgttggtagttttagatttttggttgttggtaatttatatttttttattaaaagttttaataataataaaaaagtattagtttttaaggtattaggtttatagtatagggtttttagggtgtgtttatttgattttaataaatttggtttttttgatatatttttttataattttgatatataatgtttggtttgggtatgtgtaggttttgaaataggtaggggatagttattgggtgttggtgtaagtggttatttttatttaaataaatttgatgatattgaaattagtaatagatattttgtatagttagggtttgataatagggaatgtttatttatggattataaataaatataattatgtttaattggttgtaaattttttattggtgagtattggggtaaaggtgttgtttgtaataataatgtagttgttattgattgttttttattggaattttttaattttattattgaggatggtgatatggtagatatagggtttggatgtatggattttggtatattgtaggttaataaaagtgatgtgtttattgatatttgtaatagtatatgtaaatatttagattatttaaaaatggttagtgaattttatggggatagtttgttttttttttttagatgtgagtagatgtttgttagatatttttttaatagggttggaaaatttggtgaggttgttttggatgatttttatattaaagggtttggtaatattgtagttatttaaagtagtgtattttttttaatttttagtggttttatagttattttagaattataattatttaataagttttattggttatagtgtgtataaggttataataatggtatttgttggggtaattagttatttgttattgtggttgatattatttgtagtattaatatgatattatgtattgaagtaattaaggaaggtatatataaaaatgataattttaaggaatatgtatgttatgttgaagaatatgatttatagtttgttttttagttttgtaaaattatattaattgtagagataatgatatatatatatattatggattttaatattttggaggattggtaatttggtttaatattttttttgtttgttagtttataggatatatatagatttgttattttttaggttattatttgttaaaaaatagtattttttaaagaaaaggaagatttattaaataaatatattttttgggaggttaatttaaaggaaaagttttttgtagatttagattagttttttttgggatgaaagtttttattataattaggttttaaagtaaagtttagattaaaatgtttggtttttattatttgtgtattatttattaaatgtaaaaaggttaaaaaataattgttgtggtatttatattattttattatatatgtttgtttgttttatgtatgtgttgtttgtttgtttatgtttgtgtatatgttgtatgtgttatgtgttatgtttgtgtatatgttttatgtttttgttagttttttgtttttgtatatatgtaataaattattgtgtgtattgtaaattatttgtattgtttgggtgtatttatgagtaaggtgttgtttttaaattgttttattttgttttgtttattatgtatatttatgtaatagtatttgtatgatatgtattttatagtttttaatagtattgtttttattttattttatttttattttgtgtatgtaattgattttggttgttggtataaatgtgttttttttaaattataatttaaataatatagttaattttttttttttttgtattgtttttgtttatatttgtatatgtgatttatatatatatgtagtgtagttgtaaaatgtttaattatatttatagtttaaatatgtttataggtatatattttaatttatttttaatgtttaagtgtagttttggtttgtataatagtttgttatgttaaattatgttttgtaaaagtgatttattaatatttattgttaggtgtggattaattgttttgggttatattgtttatgttttaatattttatataata

SEQ ID NO: 676 - DNA, 7824 bp, Papilloma virus
gatttgatattacggtttagaacatttttgatcccacattggcttttgccagactggctttggccacgtatatatttcgtctgtaaaaaaccatccgatgacgtcctgatacaaggtcctgcgtctcctctttggtgcctgtaacgtactaaacacagtccgcaacctctgtagacacgtactttagcttaactttacgcaacttacgtttttctgaaacgtcgctagactccatatactgaaacataaacgtctaaattcttatcacatatctctacctttaggtaaacgtcatacatttcacacgaatgctaacgatagattttattcactcatatctgtaatattaataagcgatatacctctgtgtaatcttgtttgtgattttttcacaaatttactttataattaatctacataataaacagtttctggtaacacaggtgttctttttttttccgtacacctaaatttgttttccaaagtattataaagcccagcaacctgtcccgcgacacgtcacacaacctctggggctgcatctgtttgtgttcacattggacattgttgcggtactctcctttgttgggttgcgattctcttatataaaatctaaatgtaggacttggttgactggataagacgatactcgttaatacactgtcgagtctgctcctactttatccgaacctgcccggtctacctgttcgtgttggccggtgtcgattaatgatgtaacattgaacaacaatgtgaacaccgtggtgccaagcaaacacatagttgtcatgttgttggctgcatgcttgggatgtcgtcgacgaatacccgtgtacatggtaacacacgggatcgacacgtgtcgttatttgtggtagacgttacctactgggacttccatgtttgccccatccccgcccgacatgaccgaccaaactccatcttcgccattatcttgcttcttgtcctctattataaagtctactactcctgctttgtcgtctgctatcaccatgtctaaattatctcaaatatctactaagtcatgtttcatgatgtgtccgtcttcgtctccgtcgggctcgcaacaaattacatgtccttccccacctgctatatttacgacacacacgtgattttgctttcaaacgtcgtacgagtctttcacgacatctcctgacacacctggcccgacgtttacacacacatagcacctttatatttttatttcttacgtgtgtgtcttttgctttttaataactcgatcttctgtcgcctataccgttatgacttcacctttgactcgtctaccgtgtggtccatctttcggttttaccgctgcgtctgaatttactgagcctcagatcaccccacccccgatcaagtctacattcgtcactttgcctacatctgtcaacattatgacaaggtaatgttttataatcattataagatgtattgtcattatgatttcgttgcgataatatatttaagtttcttcgaatacctcattcaaaataccttaatcaatctggtaaattttcactattttgttcgacatgtctaaccacatattgtcccataccttattcagggaggcatcgtctttcaaattttcatgattaatttgtcgtgtcatatatatgtgtggatgttacaaattgcacactgtctccttaatataataataacaattaatctaaatttacatcgtttttatctaattgacaccgttttaattactcattaaatgatagttaaggactttgtacatactaatagctcggtggttttaatgcttcagttcgtacacggaatataaccaaatcttgtcgttacagtttatattcactacacgttccctgttgtggtcttacctatctatctaattgtcacaatgtcgtatcgaaattactactatataaactaaattcactttactatgttacccgtatactattactgtaatgtctactatcactgtaacgtatatttatacgtgtcaatcgtctacaattatcattacgtcgtcgtaaaaattcttcgttacgtgttcgtttttatcattttctgacaccgcaatacacgtctgtaatattttctcgtcttttcgcaccatactgttaccctgttacctatgtttcatccacacttttttgtttactacctccattaacctctggttatcatgttaaaaattctatagttttataacttaaatgtcgtaaaaatcaacgtaaatttgtcaaaaatgttccacatggttttttttcaacatacaatgacacaccgggtcgtttatgtccctttagtataaaaccttactcaaattatgtaaaaaattttcctacgtaataaagtatacatttaaggttttcagtaaaaaccaacgtcggtaatagtctacgatttgatccatactatctactacattgtcggtattcgacctgtatatatctactaatatactctttacgtaatctaccattgctgtaaagttatctacattttgtatcccgtaatcatgttaattttacaggtggtaattattaatggagtttatgtttacgtccgtttctaagtgctaccggtataaacgtgtcatctgattgtcataaacttaaattgttaggtaaaggtaaactacgtttaccattaggtcacatattttatttactacttttaacctttaggaaaaagagttcctgcaccacgtttaatccgaattatctccttctcctgttccttttgctacctcctttatagtcgtgcaaattcacgtcacgtcctgttttaggatctgtatatgcttcgactatttttactaaattgtagtgtttaacttgtaacctttgattatgcgtacctcacacgatattacatatgtcggtctgtttacccttatagtgtaaacacggtggtccaccacggcagtaaccatcgtagtttctgatttcgcaaagttcattaacttgacgtttaccgtaatctctgtaatttacgtagtggtatattttgtctacttacctgtaacgttgtttgttcgaatcttcacaccaatagtctcggtgtttttacgaaatttttttttccgtattgtcattgacatgttatactgttactatttcgtttgtgttacctaatatgtttaacctcactttatatataataactcctttgttgtacatgaaaccatcgtcctcttcaactgatacaccccaacataatatatgtaccgttacttttctgcataaaatttataaaatttctcctacgttttttcatgagattttgtgttaataccctccatgtacacccatcagcccattaacatacaggatgtagatatggatcactagtttataggtgatgactttgacgactgggtttctggtggctccggtggttgttgctttcatgtgtcccctgtttcgctgctgctgagctaaatggtctgaggtctctgttgtgggtcatgaggtgtttcatatgtctgacgcggcacctgtcatctggtgctcctcctcctgatgtgtcatgttgattgacatgtatgtttcccgccttgcacacatcaagatttcaaagtggatagcacgtaaattttccactgggtttatcaaattttacaaattctatatctaattttggtaaatttctgaatatgacattatacagtaggtgtaccgtaacctggtcactactgtttccactgtttcatccttaacaatgacattgtatgtgttgcctttgtgttgctgttgacaaaaatttgtgacaattttatggtgggtgacacgtttattcatgaccacaatacagtaacattaacataacatgttaatgacatacatttggtgttcggttatacacgacgattcacatatatgttactataatggataaaaacaacaaacaaaatatgacaaaaatacgaacacgtaaaaaaacgccggtaaccacgatagataaagatatatacgaaccaacgaccacaaccacaacgacgaaacccacagacaccccagccgagatgcttaaaaaaagacaatgaattataaaaatatatatggttactacacataattaaaagtacgtgttatgaattgggttgttctgattgacatatgaccaagacgtgtaccaccataccataacatttataaatgacaacacacacaacaaaaataataaaaatatgtaaatgattatttatgaaaatataaaaatcgtgacagaataatactctgtgtttgccagatgttccgcgttcgcacgtagacgatgtgttgaaatggtttgtacgttccggagtccgtggacgggtggactacaatatgggtttcaacttccgtgatgatatcgtctagtttataatgctataccatcgaatccccacaaaaaacctccaaatccgtaaccatgtcccagcccatgtccaccgtcctgacctatacacggggaaccatcatggggtggcagactccgatatggaaatgtcgggtatgcagggggtcaatggcaactatgacaccccggaaacctaagaagataacatagaaattatctccttagatcaaaatatctgcggccacgtggtcggggtagttaagggtgaggtagaccaaaactataatggtggagacgtctatgatgtggacgttatgaattacaaaggagataacctcttagtagatatgtttgacaaagatgtgtaaatttagggaggaaatgactcggtaggcatgaggcgggaggacgtggacgtctccggagacctgtaaattataaaaggagaggatgacaatcgtgtgtatcaatacttttgtatggttacctatggaaacaataaagatgactgtcaccgttacagtgcagatcgtgtgggtaaggtcccagagcgggacaccgtgcggaaccaaatatgtcagcgttgtgggttgttcaattccaacaactgggacgaaaaaattgtagaggagtatctgaacattgtatactattaggtcgtaaacttccgaaattgggactcctgtgtaacgtcaaagttgtatcactgtatagcggacgaggactaggactaaaagatctataacaacgtaatgtgtctggacgtaattggagagcgtccccatgacatgcaatatcatcccaacccgttttccgatgtgaagcatgagcgtcacctttcgtttatccccgatttcatgtaatgatggttctgaattcagggtatgtcggacaggtccttgtccatgttgtcgtcgttgttaaacttaatgttagaaatttatgaagacaaagagggatatcataattactacctgaaatactataaatacgactgctacgactatgatatgtactaaaagtctcaggagacgtgagtgtatgcaggaaacggtggtgtgcatggtcattacacaggtatggtaatttatgacctaaactgtgaggagaacacagtaaccttggaccaggtctgtaacgtagaagacattgtagatacagatcaggtaaataaggatatagaggtgattgaggaaaattatggtattaacacctaccacgactaaaatacaacgtgggatcgataaaataaaacgcagcgtctgcatttgcaaaaggtataaaaaaacgtctacaggcacaccgccggatcactccggtgacacatggacggaggacacggacacagattccaacattcgtgactacttatacacagtgcgtgttcgtaaataataatacgaccgtcaaggtctgaaaaccgacaaccgttaggtataaaaaggtagttttcagggttattgttattttttcataatcaagggttccatagtccgaatgtcatatcccagaaatcccacgcaaatggactagggttatttaaaccaaaaggactatgtagaaaaatattgggactatgtgttgcaaaccagacccgtacacatccggaactttatccatcccctgtcggtaacccacaaccgcattcaccagtaggaataaatttatttaaactactgtgactttggtcattgtctatagggcgtgtcggtcccagactattgtcccttacgaatagatacctaatatttgtttgtgttaatacaaattaaccgacatttggagggtgaccactcgtaaccccatttccacaacggacattgttattacgtcgacgatgactaacaggaggtaaccttgaaaaattaagataataactcctaccactgtaccatctatgtcccaaacctacgtacctgaaaccatgtaacgtccgattattttcactacacggataactataaacattgtcatgtacgtttataggtctaataaatttttaccggtcacttggaatacccctatcaaacaagaaaaaagaatctgcactcgtctacaaacaatctgtgaaaaaattatcccgaccttttgaaccgctccgacagggcctactggaaatataatttcccaggccattatgacgtcaataggtttcatcacgtaaaaaaggttgaggatcaccgagatatcaatggagtcttagtgttaataaattattcggaataaccgatgtcgcacgtgttccagtattgttaccgtaaacgaccccgttagtcaataaacaatggcaccaactatggtgagcatcgtgattatactgtaatacgtgacttcattgattccttccatgtatatttttactattaaaattccttatacatgcagtacaacttcttatactgaatgtcaaacaaaaagtcgaaacgttttaatgtgattgacgtctctattactgtatatatgtatgatacctaaggttataaaacctcctgaccgttaaaccaaattgtggaggaggcagacggtcaaatgtcctgtgtatatctaaacaatggagggtccgataatgaacggttttttgtcgtgggggatttcttttccttctaggtaatttatttatatgaaaaaccctccaattgaatttccttttcaaaagacgtctagatctagtcaaaggaaaccctgctttcaaaaataatgttagtccggaatttcgtttcgggtctgattttgcaagccggggatgatgggcacgtggtaggtggtttgcgtttttccaattttttattaacaacaccatgaatgtgataaaataatatgtacaaacaaacaaaatacatacacaacagacaaacaaatacaaacacatatacaacatacacaatacacagtacaaacacatgtacaagatacaggaacagtcaaaggacaaagacatatatacattatttgataacacacataacatttgataaacataacaaacccacatagatactcattccacgacagggatttaacgggatgggacgggacggataatacgtatggatacattatcataaacatactatacataaaatatcaaaaattgtcatgacggaggtaaaatgaaatggaggtaaaacacgtacattggctaaagccaacgaccgtgtttgcacaaaaaaaatttgatgttaaatttgttatgtcaattaggaaagggaaggacgtgacgaaaacggatatgaacgtatacactgagtatatatgtacgtcacgtcaacgttttacaaattaatatgagtatcaaatttgtacgaatatccgtgtataaaattgaatgaaagttacgaattcacgtcaaaaccgaacgtgttatcaaacaatacggtttgatacagaacattttcactgagtgattgtaaataacggtccacacctgattggcaaaacccagtgtaacaagtacaaagttgtaaaatatattat

SEQ ID NO: 677 - DNA, 7824 bp, Papilloma virus
gatttgatattauggtttagaauatttttgatuuuauattgguttttguuagautggutttgguuaugtatatatttugtutgtaaaaaauuatuugatgaugtuutgatauaaggtuutgugtutuututttggtguutgtaaugtautaaauauagtuuguaauututgtagauaugtautttaguttaautttauguaauttaugtttttutgaaaugtugutagautuuatatautgaaauataaaugtutaaattuttatuauatatututauutttaggtaaaugtuatauatttuauaugaatgutaaugatagattttattuautuatatutgtaatattaataagugatatauututgtgtaatuttgtttgtgattttttuauaaatttautttataattaatutauataataaauagtttutggtaauauaggtgttutttttttttuugtauauutaaatttgttttuuaaagtattataaaguuuaguaauutgtuuugugauaugtuauauaauututggggutguatutgtttgtgttuauattggauattgttguggtaututuutttgttgggttgugattututtatataaaatutaaatgtaggauttggttgautggataagaugatautugttaatauautgtugagtutgutuutautttatuugaauutguuuggtutauutgttugtgttgguuggtgtugattaatgatgtaauattgaauaauaatgtgaauauugtggtguuaaguaaauauatagttgtuatgttgttggutguatguttgggatgtugtugaugaatauuugtgtauatggtaauauaugggatugauaugtgtugttatttgtggtagaugttauutautgggauttuuatgtttguuuuatuuuuguuugauatgauugauuaaautuuatuttuguuattatuttguttuttgtuututattataaagtutautautuutgutttgtugtutgutatuauuatgtutaaattatutuaaatatutautaagtuatgtttuatgatgtgtuugtuttugtutuugtugggutuguaauaaattauatgtuuttuuuuauutgutatatttaugauauauaugtgattttgutttuaaaugtugtaugagtutttuaugauatutuutgauauauutgguuugaugtttauauauauataguauutttatatttttatttuttaugtgtgtgtuttttgutttttaataautugatuttutgtuguutatauugttatgauttuauutttgautugtutauugtgtggtuuatutttuggttttauugutgugtutgaatttautgaguutuagatuauuuuauuuuugatuaagtutauattugtuautttguutauatutgtuaauattatgauaaggtaatgttttataatuattataagatgtattgtuattatgatttugttgugataatatatttaagtttuttugaatauutuattuaaaatauuttaatuaatutggtaaattttuautattttgttugauatgtutaauuauatattgtuuuatauuttattuagggagguatugtutttuaaattttuatgattaatttgtugtgtuatatatatgtgtggatgttauaaattguauautgtutuuttaatataataataauaattaatutaaatttauatugtttttatutaattgauauugttttaattautuattaaatgatagttaaggautttgtauatautaatagutuggtggttttaatguttuagttugtauauggaatataauuaaatuttgtugttauagtttatattuautauaugttuuutgttgtggtuttauutatutatutaattgtuauaatgtugtatugaaattautautatataaautaaattuautttautatgttauuugtatautattautgtaatgtutautatuautgtaaugtatatttataugtgtuaatugtutauaattatuattaugtugtugtaaaaattuttugttaugtgttugtttttatuattttutgauauuguaatauaugtutgtaatattttutugtuttttuguauuatautgttauuutgttauutatgtttuatuuauauttttttgtttautauutuuattaauututggttatuatgttaaaaattutatagttttataauttaaatgtugtaaaaatuaaugtaaatttgtuaaaaatgttuuauatggttttttttuaauatauaatgauauauugggtugtttatgtuuutttagtataaaauuttautuaaattatgtaaaaaattttuutaugtaataaagtatauatttaaggttttuagtaaaaauuaaugtuggtaatagtutaugatttgatuuatautatutautauattgtuggtattugauutgtatatatutautaatataututttaugtaatutauuattgutgtaaagttatutauattttgtatuuugtaatuatgttaattttauaggtggtaattattaatggagtttatgtttaugtuugtttutaagtgutauuggtataaaugtgtuatutgattgtuataaauttaaattgttaggtaaaggtaaautaugtttauuattaggtuauatattttatttautauttttaauutttaggaaaaagagttuutguauuaugtttaatuugaattatutuuttutuutgttuuttttgutauutuutttatagtugtguaaattuaugtuaugtuutgttttaggatutgtatatguttugautatttttautaaattgtagtgtttaauttgtaauutttgattatgugtauutuauaugatattauatatgtuggtutgtttauuuttatagtgtaaauauggtggtuuauuaugguagtaauuatugtagtttutgatttuguaaagttuattaauttgaugtttauugtaatututgtaatttaugtagtggtatattttgtutauttauutgtaaugttgtttgttugaatuttuauauuaatagtutuggtgtttttaugaaatttttttttuugtattgtuattgauatgttatautgttautatttugtttgtgttauutaatatgtttaauutuautttatatataataautuutttgttgtauatgaaauuatugtuututtuaautgatauauuuuaauataatatatgtauugttauttttutguataaaatttataaaatttutuutaugttttttuatgagattttgtgttaatauuutuuatgtauauuuatuaguuuattaauatauaggatgtagatatggatuautagtttataggtgatgautttgaugautgggtttutggtggutuuggtggttgttgutttuatgtgtuuuutgtttugutgutgutgagutaaatggtutgaggtututgttgtgggtuatgaggtgtttuatatgtutgaugugguauutgtuatutggtgutuutuutuutgatgtgtuatgttgattgauatgtatgtttuuuguuttguauauatuaagatttuaaagtggataguaugtaaattttuuautgggtttatuaaattttauaaattutatatutaattttggtaaatttutgaatatgauattatauagtaggtgtauugtaauutggtuautautgtttuuautgtttuatuuttaauaatgauattgtatgtgttguutttgtgttgutgttgauaaaaatttgtgauaattttatggtgggtgauaugtttattuatgauuauaatauagtaauattaauataauatgttaatgauatauatttggtgttuggttatauaugaugattuauatatatgttautataatggataaaaauaauaaauaaaatatgauaaaaataugaauaugtaaaaaaauguuggtaauuaugatagataaagatatataugaauuaaugauuauaauuauaaugaugaaauuuauagauauuuuaguugagatguttaaaaaaagauaatgaattataaaaatatatatggttautauauataattaaaagtaugtgttatgaattgggttgttutgattgauatatgauuaagaugtgtauuauuatauuataauatttataaatgauaauauauauaauaaaaataataaaaatatgtaaatgattatttatgaaaatataaaaatugtgauagaataataututgtgtttguuagatgttuugugttuguaugtagaugatgtgttgaaatggtttgtaugttuuggagtuugtggaugggtggautauaatatgggtttuaauttuugtgatgatatugtutagtttataatgutatauuatugaatuuuuauaaaaaauutuuaaatuugtaauuatgtuuuaguuuatgtuuauugtuutgauutatauauggggaauuatuatggggtgguagautuugatatggaaatgtugggtatguagggggtuaatgguaautatgauauuuuggaaauutaagaagataauatagaaattatutuuttagatuaaaatatutgugguuaugtggtuggggtagttaagggtgaggtagauuaaaautataatggtggagaugtutatgatgtggaugttatgaattauaaaggagataauututtagtagatatgtttgauaaagatgtgtaaatttagggaggaaatgautuggtagguatgaggugggaggaugtggaugtutuuggagauutgtaaattataaaaggagaggatgauaatugtgtgtatuaatauttttgtatggttauutatggaaauaataaagatgautgtuauugttauagtguagatugtgtgggtaaggtuuuagagugggauauugtguggaauuaaatatgtuagugttgtgggttgttuaattuuaauaautgggaugaaaaaattgtagaggagtatutgaauattgtatautattaggtugtaaauttuugaaattgggautuutgtgtaaugtuaaagttgtatuautgtataguggaugaggautaggautaaaagatutataauaaugtaatgtgtutggaugtaattggagagugtuuuuatgauatguaatatuatuuuaauuugttttuugatgtgaaguatgagugtuauutttugtttatuuuugatttuatgtaatgatggttutgaattuagggtatgtuggauaggtuuttgtuuatgttgtugtugttgttaaauttaatgttagaaatttatgaagauaaagagggatatuataattautauutgaaatautataaataugautgutaugautatgatatgtautaaaagtutuaggagaugtgagtgtatguaggaaauggtggtgtguatggtuattauauaggtatggtaatttatgauutaaautgtgaggagaauauagtaauuttggauuaggtutgtaaugtagaagauattgtagatauagatuaggtaaataaggatatagaggtgattgaggaaaattatggtattaauauutauuaugautaaaatauaaugtgggatugataaaataaaauguagugtutguatttguaaaaggtataaaaaaaugtutauagguauauuguuggatuautuuggtgauauatggauggaggauauggauauagattuuaauattugtgautauttatauauagtgugtgttugtaaataataataugauugtuaaggtutgaaaauugauaauugttaggtataaaaaggtagttttuagggttattgttattttttuataatuaagggttuuatagtuugaatgtuatatuuuagaaatuuuauguaaatggautagggttatttaaauuaaaaggautatgtagaaaaatattgggautatgtgttguaaauuagauuugtauauatuuggaautttatuuatuuuutgtuggtaauuuauaauuguattuauuagtaggaataaatttatttaaautautgtgautttggtuattgtutatagggugtgtuggtuuuagautattgtuuuttaugaatagatauutaatatttgtttgtgttaatauaaattaauugauatttggagggtgauuautugtaauuuuatttuuauaauggauattgttattaugtugaugatgautaauaggaggtaauuttgaaaaattaagataataautuutauuautgtauuatutatgtuuuaaauutaugtauutgaaauuatgtaaugtuugattattttuautauauggataautataaauattgtuatgtaugtttataggtutaataaatttttauuggtuauttggaatauuuutatuaaauaagaaaaaagaatutguautugtutauaaauaatutgtgaaaaaattatuuugauuttttgaauugutuugauaggguutautggaaatataatttuuuagguuattatgaugtuaataggtttuatuaugtaaaaaaggttgaggatuauugagatatuaatggagtuttagtgttaataaattattuggaataauugatgtuguaugtgttuuagtattgttauugtaaaugauuuugttagtuaataaauaatgguauuaautatggtgaguatugtgattatautgtaataugtgauttuattgattuuttuuatgtatatttttautattaaaattuuttatauatguagtauaauttuttatautgaatgtuaaauaaaaagtugaaaugttttaatgtgattgaugtututattautgtatatatgtatgatauutaaggttataaaauutuutgauugttaaauuaaattgtggaggagguagauggtuaaatgtuutgtgtatatutaaauaatggagggtuugataatgaauggttttttgtugtgggggatttuttttuuttutaggtaatttatttatatgaaaaauuutuuaattgaatttuuttttuaaaagaugtutagatutagtuaaaggaaauuutgutttuaaaaataatgttagtuuggaatttugtttugggtutgattttguaaguuggggatgatggguaugtggtaggtggtttgugtttttuuaattttttattaauaauauuatgaatgtgataaaataatatgtauaaauaaauaaaatauatauauaauagauaaauaaatauaaauauatatauaauatauauaatauauagtauaaauauatgtauaagatauaggaauagtuaaaggauaaagauatatatauattatttgataauauauataauatttgataaauataauaaauuuauatagatautuattuuaugauagggatttaaugggatgggaugggauggataataugtatggatauattatuataaauatautatauataaaatatuaaaaattgtuatgauggaggtaaaatgaaatggaggtaaaauaugtauattggutaaaguuaaugauugtgtttguauaaaaaaaatttgatgttaaatttgttatgtuaattaggaaagggaaggaugtgaugaaaauggatatgaaugtatauautgagtatatatgtaugtuaugtuaaugttttauaaattaatatgagtatuaaatttgtaugaatatuugtgtataaaattgaatgaaagttaugaattuaugtuaaaauugaaugtgttatuaaauaatauggtttgatauagaauattttuautgagtgattgtaaataauggtuuauauutgattgguaaaauuuagtgtaauaagtauaaagttgtaaaatatattat

SEQ ID NO: 678 - DNA, 7824 bp, Papilloma virus
gatttgatattatggtttagaatatttttgattttatattggtttttgttagattggttttggttatgtatatattttgtttgtaaaaaattatttgatgatgttttgatataaggttttgtgttttttttttggtgtttgtaatgtattaaatatagtttgtaatttttgtagatatgtattttagtttaattttatgtaatttatgtttttttgaaatgttgttagattttatatattgaaatataaatgtttaaatttttattatatatttttatttttaggtaaatgttatatattttatatgaatgttaatgatagattttatttatttatatttgtaatattaataagtgatatatttttgtgtaattttgtttgtgatttttttataaatttattttataattaatttatataataaatagtttttggtaatataggtgttttttttttttttgtatatttaaatttgttttttaaagtattataaagtttagtaatttgttttgtgatatgttatataatttttggggttgtatttgtttgtgtttatattggatattgttgtggtatttttttttgttgggttgtgatttttttatataaaatttaaatgtaggatttggttgattggataagatgatatttgttaatatattgttgagtttgtttttattttatttgaatttgtttggtttatttgtttgtgttggttggtgttgattaatgatgtaatattgaataataatgtgaatattgtggtgttaagtaaatatatagttgttatgttgttggttgtatgtttgggatgttgttgatgaatatttgtgtatatggtaatatatgggattgatatgtgttgttatttgtggtagatgttatttattgggatttttatgtttgttttatttttgtttgatatgattgattaaattttatttttgttattattttgttttttgttttttattataaagtttattatttttgttttgttgtttgttattattatgtttaaattattttaaatatttattaagttatgttttatgatgtgtttgtttttgtttttgttgggtttgtaataaattatatgtttttttttatttgttatatttatgatatatatgtgattttgtttttaaatgttgtatgagttttttatgatattttttgatatatttggtttgatgtttatatatatatagtatttttatatttttattttttatgtgtgtgttttttgttttttaataatttgattttttgttgtttatattgttatgattttatttttgatttgtttattgtgtggtttattttttggttttattgttgtgtttgaatttattgagttttagattattttatttttgattaagtttatatttgttattttgtttatatttgttaatattatgataaggtaatgttttataattattataagatgtattgttattatgattttgttgtgataatatatttaagtttttttgaatattttatttaaaatattttaattaatttggtaaatttttattattttgtttgatatgtttaattatatattgttttatattttatttagggaggtattgttttttaaatttttatgattaatttgttgtgttatatatatgtgtggatgttataaattgtatattgtttttttaatataataataataattaatttaaatttatattgtttttatttaattgatattgttttaattatttattaaatgatagttaaggattttgtatatattaatagtttggtggttttaatgttttagtttgtatatggaatataattaaattttgttgttatagtttatatttattatatgttttttgttgtggttttatttatttatttaattgttataatgttgtattgaaattattattatataaattaaatttattttattatgttatttgtatattattattgtaatgtttattattattgtaatgtatatttatatgtgttaattgtttataattattattatgttgttgtaaaaattttttgttatgtgtttgtttttattattttttgatattgtaatatatgtttgtaatatttttttgtttttttgtattatattgttattttgttatttatgttttatttatatttttttgtttattatttttattaatttttggttattatgttaaaaattttatagttttataatttaaatgttgtaaaaattaatgtaaatttgttaaaaatgttttatatggtttttttttaatatataatgatatattgggttgtttatgtttttttagtataaaattttatttaaattatgtaaaaaatttttttatgtaataaagtatatatttaaggtttttagtaaaaattaatgttggtaatagtttatgatttgatttatattatttattatattgttggtatttgatttgtatatatttattaatatattttttatgtaatttattattgttgtaaagttatttatattttgtattttgtaattatgttaattttataggtggtaattattaatggagtttatgtttatgtttgtttttaagtgttattggtataaatgtgttatttgattgttataaatttaaattgttaggtaaaggtaaattatgtttattattaggttatatattttatttattatttttaatttttaggaaaaagagtttttgtattatgtttaatttgaattattttttttttttgttttttttgttattttttttatagttgtgtaaatttatgttatgttttgttttaggatttgtatatgttttgattatttttattaaattgtagtgtttaatttgtaatttttgattatgtgtattttatatgatattatatatgttggtttgtttatttttatagtgtaaatatggtggtttattatggtagtaattattgtagtttttgattttgtaaagtttattaatttgatgtttattgtaatttttgtaatttatgtagtggtatattttgtttatttatttgtaatgttgtttgtttgaatttttatattaatagttttggtgtttttatgaaatttttttttttgtattgttattgatatgttatattgttattattttgtttgtgttatttaatatgtttaattttattttatatataataatttttttgttgtatatgaaattattgttttttttaattgatatattttaatataatatatgtattgttatttttttgtataaaatttataaaattttttttatgtttttttatgagattttgtgttaatattttttatgtatatttattagtttattaatatataggatgtagatatggattattagtttataggtgatgattttgatgattgggtttttggtggttttggtggttgttgtttttatgtgttttttgttttgttgttgttgagttaaatggtttgaggtttttgttgtgggttatgaggtgttttatatgtttgatgtggtatttgttatttggtgtttttttttttgatgtgttatgttgattgatatgtatgttttttgttttgtatatattaagattttaaagtggatagtatgtaaattttttattgggtttattaaattttataaattttatatttaattttggtaaatttttgaatatgatattatatagtaggtgtattgtaatttggttattattgtttttattgttttatttttaataatgatattgtatgtgttgtttttgtgttgttgttgataaaaatttgtgataattttatggtgggtgatatgtttatttatgattataatatagtaatattaatataatatgttaatgatatatatttggtgtttggttatatatgatgatttatatatatgttattataatggataaaaataataaataaaatatgataaaaatatgaatatgtaaaaaaatgttggtaattatgatagataaagatatatatgaattaatgattataattataatgatgaaatttatagatattttagttgagatgtttaaaaaaagataatgaattataaaaatatatatggttattatatataattaaaagtatgtgttatgaattgggttgttttgattgatatatgattaagatgtgtattattatattataatatttataaatgataatatatataataaaaataataaaaatatgtaaatgattatttatgaaaatataaaaattgtgatagaataatattttgtgtttgttagatgttttgtgtttgtatgtagatgatgtgttgaaatggtttgtatgttttggagtttgtggatgggtggattataatatgggttttaatttttgtgatgatattgtttagtttataatgttatattattgaatttttataaaaaatttttaaatttgtaattatgttttagtttatgtttattgttttgatttatatatggggaattattatggggtggtagattttgatatggaaatgttgggtatgtagggggttaatggtaattatgatattttggaaatttaagaagataatatagaaattatttttttagattaaaatatttgtggttatgtggttggggtagttaagggtgaggtagattaaaattataatggtggagatgtttatgatgtggatgttatgaattataaaggagataattttttagtagatatgtttgataaagatgtgtaaatttagggaggaaatgatttggtaggtatgaggtgggaggatgtggatgtttttggagatttgtaaattataaaaggagaggatgataattgtgtgtattaatatttttgtatggttatttatggaaataataaagatgattgttattgttatagtgtagattgtgtgggtaaggttttagagtgggatattgtgtggaattaaatatgttagtgttgtgggttgtttaattttaataattgggatgaaaaaattgtagaggagtatttgaatattgtatattattaggttgtaaatttttgaaattgggatttttgtgtaatgttaaagttgtattattgtatagtggatgaggattaggattaaaagatttataataatgtaatgtgtttggatgtaattggagagtgtttttatgatatgtaatattattttaatttgttttttgatgtgaagtatgagtgttattttttgtttatttttgattttatgtaatgatggttttgaatttagggtatgttggataggtttttgtttatgttgttgttgttgttaaatttaatgttagaaatttatgaagataaagagggatattataattattatttgaaatattataaatatgattgttatgattatgatatgtattaaaagttttaggagatgtgagtgtatgtaggaaatggtggtgtgtatggttattatataggtatggtaatttatgatttaaattgtgaggagaatatagtaattttggattaggtttgtaatgtagaagatattgtagatatagattaggtaaataaggatatagaggtgattgaggaaaattatggtattaatatttattatgattaaaatataatgtgggattgataaaataaaatgtagtgtttgtatttgtaaaaggtataaaaaaatgtttataggtatattgttggattattttggtgatatatggatggaggatatggatatagattttaatatttgtgattatttatatatagtgtgtgtttgtaaataataatatgattgttaaggtttgaaaattgataattgttaggtataaaaaggtagtttttagggttattgttatttttttataattaagggttttatagtttgaatgttatattttagaaattttatgtaaatggattagggttatttaaattaaaaggattatgtagaaaaatattgggattatgtgttgtaaattagatttgtatatatttggaattttatttattttttgttggtaatttataattgtatttattagtaggaataaatttatttaaattattgtgattttggttattgtttatagggtgtgttggttttagattattgttttttatgaatagatatttaatatttgtttgtgttaatataaattaattgatatttggagggtgattatttgtaattttatttttataatggatattgttattatgttgatgatgattaataggaggtaattttgaaaaattaagataataatttttattattgtattatttatgttttaaatttatgtatttgaaattatgtaatgtttgattatttttattatatggataattataaatattgttatgtatgtttataggtttaataaatttttattggttatttggaatatttttattaaataagaaaaaagaatttgtatttgtttataaataatttgtgaaaaaattattttgattttttgaattgttttgatagggtttattggaaatataattttttaggttattatgatgttaataggttttattatgtaaaaaaggttgaggattattgagatattaatggagttttagtgttaataaattatttggaataattgatgttgtatgtgttttagtattgttattgtaaatgattttgttagttaataaataatggtattaattatggtgagtattgtgattatattgtaatatgtgattttattgattttttttatgtatatttttattattaaaattttttatatatgtagtataattttttatattgaatgttaaataaaaagttgaaatgttttaatgtgattgatgtttttattattgtatatatgtatgatatttaaggttataaaattttttgattgttaaattaaattgtggaggaggtagatggttaaatgttttgtgtatatttaaataatggagggtttgataatgaatggttttttgttgtgggggattttttttttttttaggtaatttatttatatgaaaaattttttaattgaattttttttttaaaagatgtttagatttagttaaaggaaattttgtttttaaaaataatgttagtttggaattttgttttgggtttgattttgtaagttggggatgatgggtatgtggtaggtggtttgtgtttttttaattttttattaataatattatgaatgtgataaaataatatgtataaataaataaaatatatatataatagataaataaatataaatatatatataatatatataatatatagtataaatatatgtataagatataggaatagttaaaggataaagatatatatatattatttgataatatatataatatttgataaatataataaatttatatagatatttattttatgatagggatttaatgggatgggatgggatggataatatgtatggatatattattataaatatattatatataaaatattaaaaattgttatgatggaggtaaaatgaaatggaggtaaaatatgtatattggttaaagttaatgattgtgtttgtataaaaaaaatttgatgttaaatttgttatgttaattaggaaagggaaggatgtgatgaaaatggatatgaatgtatatattgagtatatatgtatgttatgttaatgttttataaattaatatgagtattaaatttgtatgaatatttgtgtataaaattgaatgaaagttatgaatttatgttaaaattgaatgtgttattaaataatatggtttgatatagaatatttttattgagtgattgtaaataatggtttatatttgattggtaaaatttagtgtaataagtataaagttgtaaaatatattat

SEQ ID NO: 679 - DNA, 7896 bp, Papilloma virus
gttaagaccgaaaacggtgcatataaaggtagttgaaaagaaaagggcaacggcatggcacgctttgaggatcctacacaacgaccatacaaactgcctgatttgagcacaacattgaatattcctctgcatgatattcgcatcaattgtgtgttttgcaaaggggaactgcaagaaagagaggtatttgaatttgcttttaatgacttatttatagtgtatagagactgtacaccgtatgcagcgtgtctgaaatgcatttcattttatgcaagagtaagagaattaagatattatagagattccgtgtatggagaaacattagaggctgaaaccaagacaccgttacatgagctgctgatacgctgttatagatgcctaaaacctctatgtccaacagataaattaaagcatataactgaaaaaagaagattccataatatagctggaatatatacaggacagtgtcgtgggtgtcggacccgagcaagacacctaagacagcaacgacaagcgcgtagtgaaacactggtgtaaaacaatgcatggaccaaaagcaacactttgtgacattgttttagatttggaaccacaaaattatgaggaagttgaccttgtgtgctacgagcaattacctgactccgactccgagaatgaaaaagatgaaccagatggagttaatcatcctttgctactagctagacgagctgaaccacagcgtcacaacattgtgtgtgtgtgttgtaagtgtaataatcaacttcagctagtagtagaaacctcgcaagacggattgcgagccttacagcagctgtttatggacacactatcctttgtgtgtcctttgtgtgcagcaaaccagtaacctgcaatggccgattcggaaggtacagatggggaagggacggggtgcaatggatggttttttgtgcaggcaatagtagataaaaaaacaggtgacaaaatttcagatgacgaggatgaaaatgcaacagatacaggttcagacttggtagattttattgatgataccacaacaatttgtgtacaggcagagcgcgagacagcacaggccttgtttaatgtgcaggaagcccaaagggatgcacgggaaatgcatgttttaaaacgaaagtttgggtgcagtatagaaaacagtagtgagaaagcggcggcaggaaaaaaagctaagtcaccattacaagaaatatcagtaaatgttaaccacccaaaagtaaaaagaaggttaataacagtgccagacagcggctatggctattctgaagtggaaatgctcgagactcaggtaaccgtggagaatactggaaatggggatagcaatggcagtgtttgtagcgacagtcaaatagactgtagcgacagcagtaacatggatgttgaaaacatagttccaacatcccccactaatcaattgttacagttattacatagcaaaaataagaaagcagctatgtatgcaaaatttaaagaattgtatgggttatcatttcaagatttggttaggacatttaaaagtgacagaactacctgtagcgattgggtaaccgccatttttggtgttaatccaactgtagcagaaggatttaaaacattaatacaaccctatgtgctatatgcacatatacaatgcttagattgtgcatggggagtagtaatattagcattattaagatataaatgtggaaaaaatagaataacagttgcaaaaggacttagcacattactacatgtaccagatacgtgcatgttaattgaaccacccaaattgcgtagtggtgttgcagcactatattggtacagaacaggaatgtccaatattagtgaagttataggggaaacgcccgaatggatacaaagactaacaattatacaacatggagttgatgatagcgtgtttgacctgtcagaaatgatacaatgggcgtttgataatgacctaacagatgaaagtgatattgcatatgaatatgcattaatagcagatagtaatagtaacgccgctgcatttttaaaaagcaactgccaggcaaaatacctaaaagattgtgcagttatgtgtaggcattataaaagagcacaaaaaagacaaatgagtatgtcacagtggataaaatggagatgtgataaaatagaagaggggggagattggaaacccatagtacaatttttaagatatcaaggagtagaatttataacgtttttatgtgcattaaaagattttttaaaaggtaccccaaaaagaaattgcattgtgctgtgtgggccagcaaatacaggcaagtcatactttggaatgagcctgctacattttttacaaggaactgtaatttcacatgtaaattcaaatagtcacttttggctagaacctttaacagatcgtaaattagctatgctagacgatgcaacagatagttgttggacatattttgatacatatatgcgaaatgctttggatggcaatcctataagtgtagatagaaagcataggcacctagtacaaattaaatgtccaccaatgcttattacatcaaatacaaatccagttacagataacaggtggccatatttaaatagcagattaatggtatttaaatttccaaacaaattgccatttgacaaaaatagaaatccagtatatacaattaatgacagaaactggaaatgtttttttgaaaggacgtggtgcagattagatttgaacgaggaagaggaagatgcagacagtgatggacaccctttcgcagcgtttaagtgtgttacaggatcaaatattagaacattatgaaaacgatagtaaagacattaatgaacacataaactattggaaactggtgcgtatggaaaatgtaattttatttgcagcaagagagaacaatatacatacattaaaccaccaggtggtgccaacgtttttggtgtctaaaaacaaggcatgtgaagctattgaactgcagtcaaaccgtacttccactgtaatgccctgttttttaaaacattttttaggtgctgtttgccatagttcttggcatgtttcttgcattgtccattgctcatttttaaactcagtttgtgccaaactctctaacgccatctgcagcaaggaaaacacaatgcattacacaagctggacatttatatattatgtaaatgatgtaggacagtggtgtaaaaccacaggaaatgtggacttttggggactatattataaagtggaagaggaacaggtgtactatgtaaaatttatacatgatgccaaaaaatatgggactacagacaagtgggaagtgcattataatggcaaggttattgattgttatgactctatgtgcagtaccagtgacgagcaagtatccactgctggatcttctgagcaactatcatacccctccgcaacgccccccgaagccacgtacttgggcccccaaacgtggaaccgtcagacgaagactggaaagcgaccaagacagtgtggatacacacagcaccctcagtctaccagcgtgtcagtggactactgtgacaacccagtcgtccgtttgcatccaggcaacaacccgcgacggcacatcccttgcagtaacactacgcctataatacacttaaaaggtgacaaaaatggccttaagtgtttaaggtatagattaagaaaagtacactggttatttgaaaatatttcctctacctggcattggacaggaaacagaggatcagccaaaacaggcattttaacattaacatatacaagcgaaacacaacgcaatgaatttttagatactgtaaaaattcctaatagtgtacaaatacatgttgggtatatgagtgtgtaatggttgttatgcaaatgtaacacaagccaatactgctgctatattgtatagctgaggaaatgataacccttgtatttgtgtgttgtgtttgtgtttgcttgtgtgtgtgttgcaatgtcccgcttctgcaatctgtctatatgtgtgcatatacatggttactagtatttgtgtatattgtggttatcacctcctcatatgagtgttttttactatatatattgttttttataattccactgttactactatatgcccatgcaatactgtccatacaataattgctgtatattgtaaattacattgcactgtattgtacagtatattttaaacacattattatttttgttaggtgttggttttgttacatttataataaaacatggtttcccatcgtgctgctcgtcgtaaacgtgcctcagcaacagacttatataaaacttgcaagcaggcaggtacatgcccttctgatgttattaataaagttgaaggtacaactttagctgataaaatattgcagtggaccagcctaggaatatttttaggtggactaggtattggtactggatctggtaccggtggcagaacagggtacatacctttaggggggcgtacaaacactatagtagatgtatcgcctgctaaaccaccagtagttattgaacctgttggacctacagatccatctatagttacattagttgaggattctagtgttataacatctggagcccctgccccaacatttacaggtacttcaggatttgaaatatctacctctagtacaacaacaccagctgttttggatataaccccaacctcttctgttcaaattagtagctctagttttataaatcctgcatttacagacccttctgtcattgaggttccccaaacaggtgaaatttctggtaatatattaattagtacccctacctctggtgcacatggctatgaagaaattccaatgcaaacgtttgctacggaaggtactggtttggaacccattagcagtacccccaatccaacagtacgtcgtgtggctggacctagattgtacagtagggctaatcaacaagttcgggtgtctaacgctgactttttaacacgtccatccacatttgttacatatgataaccctgcttatgatccaattgatactacattaacttttgacccctcatcagaggttccagacccggactttatggatatagttcgtttgcataggcctgcattaacatccagacgcagcactgtaaggtttagtaggctaggacaacgggcaaccatgtttacccgtagtggtaaacaaattggggcccgtgtacatttttatcatgatataagccctataccacatgctgaagatattgaattgcaacctcttgtttcttcccaggctgctactgatgatatatatgatatatatgcagatattacagatgaagcacctactagtactgccaacactgcatttacaattcctaaatcttcttttcaaagtttgtcattaacacggtcggcatctagcaccttttcaaatgtaactgttcctttggctactgcctgggatgttcctgtaaatacaggacccgatatagttttacctaatactaatattgttgaacccacttattctactacaccctttaccaccatacagtctattaatatagaaggcacaaattattttttatggcctatatattattttttacctcgtaaacgtaaacgtgttccctatttttttacagatggctctatggcgttctagtgacaacaaggtgtatctacctccaccttcggtagctaaggttgtcagcactgatgagtatgtcacccgtaccagtattttctaccacgcaggcagttccagacttcttacagttggacatccatattttaaagtacctaaaggtggtaatggtagacaggatgttcctaaggtgtctgcatatcaatacagagtatttagggttaagttacctgatcccaataaatttggccttccagataacacagtatatgatcctaactctcaacgcttggtctgggcctgtgtaggtgttgaaatcggtcggggccaacctttaggggtaggactcagtggtcatccattatataataaattggatgacactgaaaactctcatgtagcatctgctgttgataccaaagatacacgtgataatgtatctgtggattataaacaaactcagctgtgtattattggctgtgtacctgccattggagaacactggacaaagggcactgcttgtaagcctactactgtggttcagggcgattgtcctccactagaattaataaatacaccaattgaagatggtgatatggtagacacaggatatggggctatggactttaaattgttgcaggataacaaaagtgaagtaccattggatatttgtcagtctatttgtaaatatcctgattatttacaaatgtcagcagatgcttatggagacagtatgtttttttgtttaaggcgagaacaggtttttgccagacatttttggaatagatctggtactatgggtgatcaacttcctgaatcactatatattaaaggtactgacatacgtgccaacccaggcagttatttatattccccttccccaagtgggtctgtggttacttctgattcacaattatttaataaaccatattggctgcacaaggctcagggtttaaacaatggtatatgttggcacaatcaattgtttttaacagttgtagatactactcgcagcaccaatctttctgtgtgtgcttctactacttcttctattcctaatgtatacacacctaccagttttaaagaatatgccagacatgtggaggaatttgatttgcagtttatatttcaactgtgtaaaataacattaactacagaggtaatgtcatacattcataatatgaataccactattttggaggattggaattttggtgttacaccacctcctactgctagtttagttgacacataccgttttgttcaatctgctgctgtaacttgtcaaaaggacaccgcaccgccagttaaacaggacccttatgacaaactaaagttttggcctgtagatcttaaggaaaggttttctgcagatcttgatcagtttcctttgggacgtaaatttttattgcaattaggagctagacctaagcccactataggcccacgcaaacgtgcagcgcctgcccctacctctaccccatcaccaaaacgtgttaagcgtcgcaagtcttccagaaaatagtgttgtttgttatgtgtttgtatgtgtgcatgttgtatgttttgtattgtttgcctgtttgtatgttgtgtatatgtacatgtttgtttgtctgctgtatgtgtgtatttgtttttgtacataataaagtatgcatgacagtttcatgtgtggttgcacccaatgagtaaggtactgtccctttattgtttctttgtccttattacacattattacacattgccctacttacataggtgtgtttgttccttcattttgtcctgaatgtccagttttgcatttgcacattatatggcgtccattttatcctttaaatcctccattttgctgtgcaaccgttttcggttaccttggtttaaccttacctttttgaacaattaatctgtttaaacatcagcaaaacagttaatccccatcttgtttcctcctacacgcctagactactaacacaacttacaaacgccaaatagttagtcatcatcctgtccaggtgcactctaacaatacttgcataactttggtggcgcccttgttaataaaacagcttttaggcacatattttcactgtttttactactttaattgcataattggcttgcaaaactactgtgcaatccaagaatgtgtctataatttattgtaaaaaacatgactaaggtttttgtcattgttaagcaaccgaaaaaggtcgggcaagtacatgcacactttctacttattactttttacaatcatagtaataaaaaagggtgtaaccgaaaacg

SEQ ID NO: 680 - DNA, 7896 bp, Papilloma virus
gttaagauugaaaauggtguatataaaggtagttgaaaagaaaaggguaaugguatgguaugutttgaggatuutauauaaugauuatauaaautguutgatttgaguauaauattgaatattuututguatgatattuguatuaattgtgtgttttguaaaggggaautguaagaaagagaggtatttgaatttguttttaatgauttatttatagtgtatagagautgtauauugtatguagugtgtutgaaatguatttuattttatguaagagtaagagaattaagatattatagagattuugtgtatggagaaauattagaggutgaaauuaagauauugttauatgagutgutgataugutgttatagatguutaaaauututatgtuuaauagataaattaaaguatataautgaaaaaagaagattuuataatatagutggaatatatauaggauagtgtugtgggtgtuggauuugaguaagauauutaagauaguaaugauaagugugtagtgaaauautggtgtaaaauaatguatggauuaaaaguaauautttgtgauattgttttagatttggaauuauaaaattatgaggaagttgauuttgtgtgutaugaguaattauutgautuugautuugagaatgaaaaagatgaauuagatggagttaatuatuutttgutautagutagaugagutgaauuauagugtuauaauattgtgtgtgtgtgttgtaagtgtaataatuaauttuagutagtagtagaaauutuguaagauggattgugaguuttauaguagutgtttatggauauautatuutttgtgtgtuutttgtgtguaguaaauuagtaauutguaatgguugattuggaaggtauagatggggaagggauggggtguaatggatggttttttgtguagguaatagtagataaaaaaauaggtgauaaaatttuagatgaugaggatgaaaatguaauagatauaggttuagauttggtagattttattgatgatauuauaauaatttgtgtauagguagagugugagauaguauagguuttgtttaatgtguaggaaguuuaaagggatguaugggaaatguatgttttaaaaugaaagtttgggtguagtatagaaaauagtagtgagaaaguggugguaggaaaaaaagutaagtuauuattauaagaaatatuagtaaatgttaauuauuuaaaagtaaaaagaaggttaataauagtguuagauaguggutatggutattutgaagtggaaatgutugagautuaggtaauugtggagaatautggaaatggggataguaatgguagtgtttgtagugauagtuaaatagautgtagugauaguagtaauatggatgttgaaaauatagttuuaauatuuuuuautaatuaattgttauagttattauataguaaaaataagaaaguagutatgtatguaaaatttaaagaattgtatgggttatuatttuaagatttggttaggauatttaaaagtgauagaautauutgtagugattgggtaauuguuatttttggtgttaatuuaautgtaguagaaggatttaaaauattaatauaauuutatgtgutatatguauatatauaatguttagattgtguatggggagtagtaatattaguattattaagatataaatgtggaaaaaatagaataauagttguaaaaggauttaguauattautauatgtauuagataugtguatgttaattgaauuauuuaaattgugtagtggtgttguaguautatattggtauagaauaggaatgtuuaatattagtgaagttataggggaaauguuugaatggatauaaagautaauaattatauaauatggagttgatgatagugtgtttgauutgtuagaaatgatauaatgggugtttgataatgauutaauagatgaaagtgatattguatatgaatatguattaataguagatagtaatagtaauguugutguatttttaaaaaguaautguuagguaaaatauutaaaagattgtguagttatgtgtagguattataaaagaguauaaaaaagauaaatgagtatgtuauagtggataaaatggagatgtgataaaatagaagaggggggagattggaaauuuatagtauaatttttaagatatuaaggagtagaatttataaugtttttatgtguattaaaagattttttaaaaggtauuuuaaaaagaaattguattgtgutgtgtggguuaguaaatauagguaagtuatautttggaatgaguutgutauattttttauaaggaautgtaatttuauatgtaaattuaaatagtuauttttggutagaauutttaauagatugtaaattagutatgutagaugatguaauagatagttgttggauatattttgatauatatatgugaaatgutttggatgguaatuutataagtgtagatagaaaguatagguauutagtauaaattaaatgtuuauuaatguttattauatuaaatauaaatuuagttauagataauaggtgguuatatttaaataguagattaatggtatttaaatttuuaaauaaattguuatttgauaaaaatagaaatuuagtatatauaattaatgauagaaautggaaatgtttttttgaaaggaugtggtguagattagatttgaaugaggaagaggaagatguagauagtgatggauauuutttuguagugtttaagtgtgttauaggatuaaatattagaauattatgaaaaugatagtaaagauattaatgaauauataaautattggaaautggtgugtatggaaaatgtaattttatttguaguaagagagaauaatatauatauattaaauuauuaggtggtguuaaugtttttggtgtutaaaaauaagguatgtgaagutattgaautguagtuaaauugtauttuuautgtaatguuutgttttttaaaauattttttaggtgutgtttguuatagttuttgguatgtttuttguattgtuuattgutuatttttaaautuagtttgtguuaaautututaauguuatutguaguaaggaaaauauaatguattauauaagutggauatttatatattatgtaaatgatgtaggauagtggtgtaaaauuauaggaaatgtggauttttggggautatattataaagtggaagaggaauaggtgtautatgtaaaatttatauatgatguuaaaaaatatgggautauagauaagtgggaagtguattataatgguaaggttattgattgttatgaututatgtguagtauuagtgaugaguaagtatuuautgutggatuttutgaguaautatuatauuuutuuguaauguuuuuugaaguuaugtauttggguuuuuaaaugtggaauugtuagaugaagautggaaagugauuaagauagtgtggatauauauaguauuutuagtutauuagugtgtuagtggautautgtgauaauuuagtugtuugtttguatuuagguaauaauuugugaugguauatuuuttguagtaauautauguutataatauauttaaaaggtgauaaaaatgguuttaagtgtttaaggtatagattaagaaaagtauautggttatttgaaaatatttuututauutgguattggauaggaaauagaggatuaguuaaaauagguattttaauattaauatatauaagugaaauauaauguaatgaatttttagatautgtaaaaattuutaatagtgtauaaatauatgttgggtatatgagtgtgtaatggttgttatguaaatgtaauauaaguuaatautgutgutatattgtatagutgaggaaatgataauuuttgtatttgtgtgttgtgtttgtgtttguttgtgtgtgtgttguaatgtuuuguttutguaatutgtutatatgtgtguatatauatggttautagtatttgtgtatattgtggttatuauutuutuatatgagtgttttttautatatatattgttttttataattuuautgttautautatatguuuatguaatautgtuuatauaataattgutgtatattgtaaattauattguautgtattgtauagtatattttaaauauattattatttttgttaggtgttggttttgttauatttataataaaauatggtttuuuatugtgutgutugtugtaaaugtguutuaguaauagauttatataaaauttguaaguagguaggtauatguuuttutgatgttattaataaagttgaaggtauaautttagutgataaaatattguagtggauuaguutaggaatatttttaggtggautaggtattggtautggatutggtauuggtgguagaauagggtauatauutttaggggggugtauaaauautatagtagatgtatuguutgutaaauuauuagtagttattgaauutgttggauutauagatuuatutatagttauattagttgaggattutagtgttataauatutggaguuuutguuuuaauatttauaggtauttuaggatttgaaatatutauututagtauaauaauauuagutgttttggatataauuuuaauututtutgttuaaattagtagututagttttataaatuutguatttauagauuuttutgtuattgaggttuuuuaaauaggtgaaatttutggtaatatattaattagtauuuutauututggtguauatggutatgaagaaattuuaatguaaaugtttgutauggaaggtautggtttggaauuuattaguagtauuuuuaatuuaauagtaugtugtgtggutggauutagattgtauagtagggutaatuaauaagttugggtgtutaaugutgautttttaauaugtuuatuuauatttgttauatatgataauuutguttatgatuuaattgatautauattaauttttgauuuutuatuagaggttuuagauuuggautttatggatatagttugtttguatagguutguattaauatuuagauguaguautgtaaggtttagtaggutaggauaauggguaauuatgtttauuugtagtggtaaauaaattgggguuugtgtauatttttatuatgatataaguuutatauuauatgutgaagatattgaattguaauututtgtttuttuuuaggutgutautgatgatatatatgatatatatguagatattauagatgaaguauutautagtautguuaauautguatttauaattuutaaatuttuttttuaaagtttgtuattaauauggtugguatutaguauuttttuaaatgtaautgttuutttggutautguutgggatgttuutgtaaatauaggauuugatatagttttauutaatautaatattgttgaauuuauttattutautauauuutttauuauuatauagtutattaatatagaagguauaaattattttttatgguutatatattattttttauutugtaaaugtaaaugtgttuuutatttttttauagatggututatggugttutagtgauaauaaggtgtatutauutuuauuttuggtagutaaggttgtuaguautgatgagtatgtuauuugtauuagtattttutauuauguagguagttuuagauttuttauagttggauatuuatattttaaagtauutaaaggtggtaatggtagauaggatgttuutaaggtgtutguatatuaatauagagtatttagggttaagttauutgatuuuaataaatttgguuttuuagataauauagtatatgatuutaaututuaauguttggtutggguutgtgtaggtgttgaaatuggtugggguuaauutttaggggtaggautuagtggtuatuuattatataataaattggatgauautgaaaaututuatgtaguatutgutgttgatauuaaagatauaugtgataatgtatutgtggattataaauaaautuagutgtgtattattggutgtgtauutguuattggagaauautggauaaaggguautguttgtaaguutautautgtggttuagggugattgtuutuuautagaattaataaatauauuaattgaagatggtgatatggtagauauaggatatggggutatggautttaaattgttguaggataauaaaagtgaagtauuattggatatttgtuagtutatttgtaaatatuutgattatttauaaatgtuaguagatguttatggagauagtatgtttttttgtttaaggugagaauaggtttttguuagauatttttggaatagatutggtautatgggtgatuaauttuutgaatuautatatattaaaggtautgauataugtguuaauuuagguagttatttatattuuuuttuuuuaagtgggtutgtggttauttutgattuauaattatttaataaauuatattggutguauaaggutuagggtttaaauaatggtatatgttgguauaatuaattgtttttaauagttgtagatautautuguaguauuaatutttutgtgtgtguttutautauttuttutattuutaatgtatauauauutauuagttttaaagaatatguuagauatgtggaggaatttgatttguagtttatatttuaautgtgtaaaataauattaautauagaggtaatgtuatauattuataatatgaatauuautattttggaggattggaattttggtgttauauuauutuutautgutagtttagttgauauatauugttttgttuaatutgutgutgtaauttgtuaaaaggauauuguauuguuagttaaauaggauuuttatgauaaautaaagttttgguutgtagatuttaaggaaaggttttutguagatuttgatuagtttuutttgggaugtaaatttttattguaattaggagutagauutaaguuuautatagguuuauguaaaugtguaguguutguuuutauututauuuuatuauuaaaaugtgttaagugtuguaagtuttuuagaaaatagtgttgtttgttatgtgtttgtatgtgtguatgttgtatgttttgtattgtttguutgtttgtatgttgtgtatatgtauatgtttgtttgtutgutgtatgtgtgtatttgtttttgtauataataaagtatguatgauagtttuatgtgtggttguauuuaatgagtaaggtautgtuuutttattgtttutttgtuuttattauauattattauauattguuutauttauataggtgtgtttgttuuttuattttgtuutgaatgtuuagttttguatttguauattatatggugtuuattttatuutttaaatuutuuattttgutgtguaauugttttuggttauuttggtttaauuttauutttttgaauaattaatutgtttaaauatuaguaaaauagttaatuuuuatuttgtttuutuutauauguutagautautaauauaauttauaaauguuaaatagttagtuatuatuutgtuuaggtguaututaauaatauttguataautttggtgguguuuttgttaataaaauaguttttagguauatattttuautgtttttautautttaattguataattgguttguaaaautautgtguaatuuaagaatgtgtutataatttattgtaaaaaauatgautaaggtttttgtuattgttaaguaauugaaaaaggtuggguaagtauatguauautttutauttattautttttauaatuatagtaataaaaaagggtgtaauugaaaaug

SEQ ID NO: 681 - DNA, 7896 bp, Papilloma virus
gttaagattgaaaatggtgtatataaaggtagttgaaaagaaaagggtaatggtatggtatgttttgaggattttatataatgattatataaattgtttgatttgagtataatattgaatatttttttgtatgatatttgtattaattgtgtgttttgtaaaggggaattgtaagaaagagaggtatttgaatttgtttttaatgatttatttatagtgtatagagattgtatattgtatgtagtgtgtttgaaatgtattttattttatgtaagagtaagagaattaagatattatagagattttgtgtatggagaaatattagaggttgaaattaagatattgttatatgagttgttgatatgttgttatagatgtttaaaatttttatgtttaatagataaattaaagtatataattgaaaaaagaagattttataatatagttggaatatatataggatagtgttgtgggtgttggatttgagtaagatatttaagatagtaatgataagtgtgtagtgaaatattggtgtaaaataatgtatggattaaaagtaatattttgtgatattgttttagatttggaattataaaattatgaggaagttgattttgtgtgttatgagtaattatttgattttgattttgagaatgaaaaagatgaattagatggagttaattattttttgttattagttagatgagttgaattatagtgttataatattgtgtgtgtgtgttgtaagtgtaataattaattttagttagtagtagaaattttgtaagatggattgtgagttttatagtagttgtttatggatatattattttttgtgtgttttttgtgtgtagtaaattagtaatttgtaatggttgatttggaaggtatagatggggaagggatggggtgtaatggatggttttttgtgtaggtaatagtagataaaaaaataggtgataaaattttagatgatgaggatgaaaatgtaatagatataggtttagatttggtagattttattgatgatattataataatttgtgtataggtagagtgtgagatagtataggttttgtttaatgtgtaggaagtttaaagggatgtatgggaaatgtatgttttaaaatgaaagtttgggtgtagtatagaaaatagtagtgagaaagtggtggtaggaaaaaaagttaagttattattataagaaatattagtaaatgttaattatttaaaagtaaaaagaaggttaataatagtgttagatagtggttatggttattttgaagtggaaatgtttgagatttaggtaattgtggagaatattggaaatggggatagtaatggtagtgtttgtagtgatagttaaatagattgtagtgatagtagtaatatggatgttgaaaatatagttttaatattttttattaattaattgttatagttattatatagtaaaaataagaaagtagttatgtatgtaaaatttaaagaattgtatgggttattattttaagatttggttaggatatttaaaagtgatagaattatttgtagtgattgggtaattgttatttttggtgttaatttaattgtagtagaaggatttaaaatattaatataattttatgtgttatatgtatatatataatgtttagattgtgtatggggagtagtaatattagtattattaagatataaatgtggaaaaaatagaataatagttgtaaaaggatttagtatattattatatgtattagatatgtgtatgttaattgaattatttaaattgtgtagtggtgttgtagtattatattggtatagaataggaatgtttaatattagtgaagttataggggaaatgtttgaatggatataaagattaataattatataatatggagttgatgatagtgtgtttgatttgttagaaatgatataatgggtgtttgataatgatttaatagatgaaagtgatattgtatatgaatatgtattaatagtagatagtaatagtaatgttgttgtatttttaaaaagtaattgttaggtaaaatatttaaaagattgtgtagttatgtgtaggtattataaaagagtataaaaaagataaatgagtatgttatagtggataaaatggagatgtgataaaatagaagaggggggagattggaaatttatagtataatttttaagatattaaggagtagaatttataatgtttttatgtgtattaaaagattttttaaaaggtattttaaaaagaaattgtattgtgttgtgtgggttagtaaatataggtaagttatattttggaatgagtttgttatattttttataaggaattgtaattttatatgtaaatttaaatagttatttttggttagaatttttaatagattgtaaattagttatgttagatgatgtaatagatagttgttggatatattttgatatatatatgtgaaatgttttggatggtaattttataagtgtagatagaaagtataggtatttagtataaattaaatgtttattaatgtttattatattaaatataaatttagttatagataataggtggttatatttaaatagtagattaatggtatttaaatttttaaataaattgttatttgataaaaatagaaatttagtatatataattaatgatagaaattggaaatgtttttttgaaaggatgtggtgtagattagatttgaatgaggaagaggaagatgtagatagtgatggatatttttttgtagtgtttaagtgtgttataggattaaatattagaatattatgaaaatgatagtaaagatattaatgaatatataaattattggaaattggtgtgtatggaaaatgtaattttatttgtagtaagagagaataatatatatatattaaattattaggtggtgttaatgtttttggtgtttaaaaataaggtatgtgaagttattgaattgtagttaaattgtatttttattgtaatgttttgttttttaaaatattttttaggtgttgtttgttatagtttttggtatgttttttgtattgtttattgtttatttttaaatttagtttgtgttaaattttttaatgttatttgtagtaaggaaaatataatgtattatataagttggatatttatatattatgtaaatgatgtaggatagtggtgtaaaattataggaaatgtggatttttggggattatattataaagtggaagaggaataggtgtattatgtaaaatttatatatgatgttaaaaaatatgggattatagataagtgggaagtgtattataatggtaaggttattgattgttatgattttatgtgtagtattagtgatgagtaagtatttattgttggattttttgagtaattattatatttttttgtaatgttttttgaagttatgtatttgggtttttaaatgtggaattgttagatgaagattggaaagtgattaagatagtgtggatatatatagtatttttagtttattagtgtgttagtggattattgtgataatttagttgtttgtttgtatttaggtaataatttgtgatggtatattttttgtagtaatattatgtttataatatatttaaaaggtgataaaaatggttttaagtgtttaaggtatagattaagaaaagtatattggttatttgaaaatattttttttatttggtattggataggaaatagaggattagttaaaataggtattttaatattaatatatataagtgaaatataatgtaatgaatttttagatattgtaaaaatttttaatagtgtataaatatatgttgggtatatgagtgtgtaatggttgttatgtaaatgtaatataagttaatattgttgttatattgtatagttgaggaaatgataatttttgtatttgtgtgttgtgtttgtgtttgtttgtgtgtgtgttgtaatgttttgtttttgtaatttgtttatatgtgtgtatatatatggttattagtatttgtgtatattgtggttattatttttttatatgagtgttttttattatatatattgttttttataattttattgttattattatatgtttatgtaatattgtttatataataattgttgtatattgtaaattatattgtattgtattgtatagtatattttaaatatattattatttttgttaggtgttggttttgttatatttataataaaatatggttttttattgtgttgtttgttgtaaatgtgttttagtaatagatttatataaaatttgtaagtaggtaggtatatgtttttttgatgttattaataaagttgaaggtataattttagttgataaaatattgtagtggattagtttaggaatatttttaggtggattaggtattggtattggatttggtattggtggtagaatagggtatatatttttaggggggtgtataaatattatagtagatgtattgtttgttaaattattagtagttattgaatttgttggatttatagatttatttatagttatattagttgaggattttagtgttataatatttggagtttttgttttaatatttataggtattttaggatttgaaatatttatttttagtataataatattagttgttttggatataattttaattttttttgtttaaattagtagttttagttttataaattttgtatttatagatttttttgttattgaggttttttaaataggtgaaatttttggtaatatattaattagtatttttatttttggtgtatatggttatgaagaaattttaatgtaaatgtttgttatggaaggtattggtttggaatttattagtagtatttttaatttaatagtatgttgtgtggttggatttagattgtatagtagggttaattaataagtttgggtgtttaatgttgattttttaatatgtttatttatatttgttatatatgataattttgtttatgatttaattgatattatattaatttttgattttttattagaggttttagatttggattttatggatatagtttgtttgtataggtttgtattaatatttagatgtagtattgtaaggtttagtaggttaggataatgggtaattatgtttatttgtagtggtaaataaattggggtttgtgtatatttttattatgatataagttttatattatatgttgaagatattgaattgtaattttttgtttttttttaggttgttattgatgatatatatgatatatatgtagatattatagatgaagtatttattagtattgttaatattgtatttataatttttaaattttttttttaaagtttgttattaatatggttggtatttagtatttttttaaatgtaattgtttttttggttattgtttgggatgtttttgtaaatataggatttgatatagttttatttaatattaatattgttgaatttatttattttattatattttttattattatatagtttattaatatagaaggtataaattattttttatggtttatatattattttttattttgtaaatgtaaatgtgttttttatttttttatagatggttttatggtgttttagtgataataaggtgtatttatttttatttttggtagttaaggttgttagtattgatgagtatgttatttgtattagtattttttattatgtaggtagttttagattttttatagttggatatttatattttaaagtatttaaaggtggtaatggtagataggatgtttttaaggtgtttgtatattaatatagagtatttagggttaagttatttgattttaataaatttggttttttagataatatagtatatgattttaatttttaatgtttggtttgggtttgtgtaggtgttgaaattggttggggttaatttttaggggtaggatttagtggttatttattatataataaattggatgatattgaaaatttttatgtagtatttgttgttgatattaaagatatatgtgataatgtatttgtggattataaataaatttagttgtgtattattggttgtgtatttgttattggagaatattggataaagggtattgtttgtaagtttattattgtggtttagggtgattgttttttattagaattaataaatatattaattgaagatggtgatatggtagatataggatatggggttatggattttaaattgttgtaggataataaaagtgaagtattattggatatttgttagtttatttgtaaatattttgattatttataaatgttagtagatgtttatggagatagtatgtttttttgtttaaggtgagaataggtttttgttagatatttttggaatagatttggtattatgggtgattaattttttgaattattatatattaaaggtattgatatatgtgttaatttaggtagttatttatattttttttttttaagtgggtttgtggttatttttgatttataattatttaataaattatattggttgtataaggtttagggtttaaataatggtatatgttggtataattaattgtttttaatagttgtagatattatttgtagtattaatttttttgtgtgtgtttttattattttttttatttttaatgtatatatatttattagttttaaagaatatgttagatatgtggaggaatttgatttgtagtttatattttaattgtgtaaaataatattaattatagaggtaatgttatatatttataatatgaatattattattttggaggattggaattttggtgttatattattttttattgttagtttagttgatatatattgttttgtttaatttgttgttgtaatttgttaaaaggatattgtattgttagttaaataggatttttatgataaattaaagttttggtttgtagattttaaggaaaggttttttgtagattttgattagttttttttgggatgtaaatttttattgtaattaggagttagatttaagtttattataggtttatgtaaatgtgtagtgtttgtttttatttttattttattattaaaatgtgttaagtgttgtaagttttttagaaaatagtgttgtttgttatgtgtttgtatgtgtgtatgttgtatgttttgtattgtttgtttgtttgtatgttgtgtatatgtatatgtttgtttgtttgttgtatgtgtgtatttgtttttgtatataataaagtatgtatgatagttttatgtgtggttgtatttaatgagtaaggtattgtttttttattgtttttttgtttttattatatattattatatattgttttatttatataggtgtgtttgtttttttattttgttttgaatgtttagttttgtatttgtatattatatggtgtttattttattttttaaattttttattttgttgtgtaattgtttttggttattttggtttaattttatttttttgaataattaatttgtttaaatattagtaaaatagttaatttttattttgtttttttttatatgtttagattattaatataatttataaatgttaaatagttagttattattttgtttaggtgtattttaataatatttgtataattttggtggtgtttttgttaataaaatagtttttaggtatatatttttattgtttttattattttaattgtataattggtttgtaaaattattgtgtaatttaagaatgtgtttataatttattgtaaaaaatatgattaaggtttttgttattgttaagtaattgaaaaaggttgggtaagtatatgtatattttttatttattattttttataattatagtaataaaaaagggtgtaattgaaaatg

SEQ ID NO: 682 - DNA, 7896 bp, Papilloma virus
caattctggcttttgccacgtatatttccatcaacttttcttttcccgttgccgtaccgtgcgaaactcctaggatgtgttgctggtatgtttgacggactaaactcgtgttgtaacttataaggagacgtactataagcgtagttaacacacaaaacgtttccccttgacgttctttctctccataaacttaaacgaaaattactgaataaatatcacatatctctgacatgtggcatacgtcgcacagactttacgtaaagtaaaatacgttctcattctcttaattctataatatctctaaggcacatacctctttgtaatctccgactttggttctgtggcaatgtactcgacgactatgcgacaatatctacggattttggagatacaggttgtctatttaatttcgtatattgacttttttcttctaaggtattatatcgaccttatatatgtcctgtcacagcacccacagcctgggctcgttctgtggattctgtcgttgctgttcgcgcatcactttgtgaccacattttgttacgtacctggttttcgttgtgaaacactgtaacaaaatctaaaccttggtgttttaatactccttcaactggaacacacgatgctcgttaatggactgaggctgaggctcttactttttctacttggtctacctcaattagtaggaaacgatgatcgatctgctcgacttggtgtcgcagtgttgtaacacacacacacaacattcacattattagttgaagtcgatcatcatctttggagcgttctgcctaacgctcggaatgtcgtcgacaaatacctgtgtgataggaaacacacaggaaacacacgtcgtttggtcattggacgttaccggctaagccttccatgtctaccccttccctgccccacgttacctaccaaaaaacacgtccgttatcatctatttttttgtccactgttttaaagtctactgctcctacttttacgttgtctatgtccaagtctgaaccatctaaaataactactatggtgttgttaaacacatgtccgtctcgcgctctgtcgtgtccggaacaaattacacgtccttcgggtttccctacgtgccctttacgtacaaaattttgctttcaaacccacgtcatatcttttgtcatcactctttcgccgccgtcctttttttcgattcagtggtaatgttctttatagtcatttacaattggtgggttttcatttttcttccaattattgtcacggtctgtcgccgataccgataagacttcacctttacgagctctgagtccattggcacctcttatgacctttacccctatcgttaccgtcacaaacatcgctgtcagtttatctgacatcgctgtcgtcattgtacctacaacttttgtatcaaggttgtagggggtgattagttaacaatgtcaataatgtatcgtttttattctttcgtcgatacatacgttttaaatttcttaacatacccaatagtaaagttctaaaccaatcctgtaaattttcactgtcttgatggacatcgctaacccattggcggtaaaaaccacaattaggttgacatcgtcttcctaaattttgtaattatgttgggatacacgatatacgtgtatatgttacgaatctaacacgtacccctcatcattataatcgtaataattctatatttacaccttttttatcttattgtcaacgttttcctgaatcgtgtaatgatgtacatggtctatgcacgtacaattaacttggtgggtttaacgcatcaccacaacgtcgtgatataaccatgtcttgtccttacaggttataatcacttcaatatcccctttgcgggcttacctatgtttctgattgttaatatgttgtacctcaactactatcgcacaaactggacagtctttactatgttacccgcaaactattactggattgtctactttcactataacgtatacttatacgtaattatcgtctatcattatcattgcggcgacgtaaaaatttttcgttgacggtccgttttatggattttctaacacgtcaatacacatccgtaatattttctcgtgttttttctgtttactcatacagtgtcacctattttacctctacactattttatcttctcccccctctaacctttgggtatcatgttaaaaattctatagttcctcatcttaaatattgcaaaaatacacgtaattttctaaaaaattttccatggggtttttctttaacgtaacacgacacacccggtcgtttatgtccgttcagtatgaaaccttactcggacgatgtaaaaaatgttccttgacattaaagtgtacatttaagtttatcagtgaaaaccgatcttggaaattgtctagcatttaatcgatacgatctgctacgttgtctatcaacaacctgtataaaactatgtatatacgctttacgaaacctaccgttaggatattcacatctatctttcgtatccgtggatcatgtttaatttacaggtggttacgaataatgtagtttatgtttaggtcaatgtctattgtccaccggtataaatttatcgtctaattaccataaatttaaaggtttgtttaacggtaaactgtttttatctttaggtcatatatgttaattactgtctttgacctttacaaaaaaactttcctgcaccacgtctaatctaaacttgctccttctccttctacgtctgtcactacctgtgggaaagcgtcgcaaattcacacaatgtcctagtttataatcttgtaatacttttgctatcatttctgtaattacttgtgtatttgataacctttgaccacgcataccttttacattaaaataaacgtcgttctctcttgttatatgtatgtaatttggtggtccaccacggttgcaaaaaccacagatttttgttccgtacacttcgataacttgacgtcagtttggcatgaaggtgacattacgggacaaaaaattttgtaaaaaatccacgacaaacggtatcaagaaccgtacaaagaacgtaacaggtaacgagtaaaaatttgagtcaaacacggtttgagagattgcggtagacgtcgttccttttgtgttacgtaatgtgttcgacctgtaaatatataatacatttactacatcctgtcaccacattttggtgtcctttacacctgaaaacccctgatataatatttcaccttctccttgtccacatgatacattttaaatatgtactacggttttttataccctgatgtctgttcacccttcacgtaatattaccgttccaataactaacaatactgagatacacgtcatggtcactgctcgttcataggtgacgacctagaagactcgttgatagtatggggaggcgttgcggggggcttcggtgcatgaacccgggggtttgcaccttggcagtctgcttctgacctttcgctggttctgtcacacctatgtgtgtcgtgggagtcagatggtcgcacagtcacctgatgacactgttgggtcagcaggcaaacgtaggtccgttgttgggcgctgccgtgtagggaacgtcattgtgatgcggatattatgtgaattttccactgtttttaccggaattcacaaattccatatctaattcttttcatgtgaccaataaacttttataaaggagatggaccgtaacctgtcctttgtctcctagtcggttttgtccgtaaaattgtaattgtatatgttcgctttgtgttgcgttacttaaaaatctatgacatttttaaggattatcacatgtttatgtacaacccatatactcacacattaccaacaatacgtttacattgtgttcggttatgacgacgatataacatatcgactcctttactattgggaacataaacacacaacacaaacacaaacgaacacacacacaacgttacagggcgaagacgttagacagatatacacacgtatatgtaccaatgatcataaacacatataacaccaatagtggaggagtatactcacaaaaaatgatatatataacaaaaaatattaaggtgacaatgatgatatacgggtacgttatgacaggtatgttattaacgacatataacatttaatgtaacgtgacataacatgtcatataaaatttgtgtaataataaaaacaatccacaaccaaaacaatgtaaatattattttgtaccaaagggtagcacgacgagcagcatttgcacggagtcgttgtctgaatatattttgaacgttcgtccgtccatgtacgggaagactacaataattatttcaacttccatgttgaaatcgactattttataacgtcacctggtcggatccttataaaaatccacctgatccataaccatgacctagaccatggccaccgtcttgtcccatgtatggaaatccccccgcatgtttgtgatatcatctacatagcggacgatttggtggtcatcaataacttggacaacctggatgtctaggtagatatcaatgtaatcaactcctaagatcacaatattgtagacctcggggacggggttgtaaatgtccatgaagtcctaaactttatagatggagatcatgttgttgtggtcgacaaaacctatattggggttggagaagacaagtttaatcatcgagatcaaaatatttaggacgtaaatgtctgggaagacagtaactccaaggggtttgtccactttaaagaccattatataattaatcatggggatggagaccacgtgtaccgatacttctttaaggttacgtttgcaaacgatgccttccatgaccaaaccttgggtaatcgtcatgggggttaggttgtcatgcagcacaccgacctggatctaacatgtcatcccgattagttgttcaagcccacagattgcgactgaaaaattgtgcaggtaggtgtaaacaatgtatactattgggacgaatactaggttaactatgatgtaattgaaaactggggagtagtctccaaggtctgggcctgaaatacctatatcaagcaaacgtatccggacgtaattgtaggtctgcgtcgtgacattccaaatcatccgatcctgttgcccgttggtacaaatgggcatcaccatttgtttaaccccgggcacatgtaaaaatagtactatattcgggatatggtgtacgacttctataacttaacgttggagaacaaagaagggtccgacgatgactactatatatactatatatacgtctataatgtctacttcgtggatgatcatgacggttgtgacgtaaatgttaaggatttagaagaaaagtttcaaacagtaattgtgccagccgtagatcgtggaaaagtttacattgacaaggaaaccgatgacggaccctacaaggacatttatgtcctgggctatatcaaaatggattatgattataacaacttgggtgaataagatgatgtgggaaatggtggtatgtcagataattatatcttccgtgtttaataaaaaataccggatatataataaaaaatggagcatttgcatttgcacaagggataaaaaaatgtctaccgagataccgcaagatcactgttgttccacatagatggaggtggaagccatcgattccaacagtcgtgactactcatacagtgggcatggtcataaaagatggtgcgtccgtcaaggtctgaagaatgtcaacctgtaggtataaaatttcatggatttccaccattaccatctgtcctacaaggattccacagacgtatagttatgtctcataaatcccaattcaatggactagggttatttaaaccggaaggtctattgtgtcatatactaggattgagagttgcgaaccagacccggacacatccacaactttagccagccccggttggaaatccccatcctgagtcaccagtaggtaatatattatttaacctactgtgacttttgagagtacatcgtagacgacaactatggtttctatgtgcactattacatagacacctaatatttgtttgagtcgacacataataaccgacacatggacggtaacctcttgtgacctgtttcccgtgacgaacattcggatgatgacaccaagtcccgctaacaggaggtgatcttaattatttatgtggttaacttctaccactataccatctgtgtcctataccccgatacctgaaatttaacaacgtcctattgttttcacttcatggtaacctataaacagtcagataaacatttataggactaataaatgtttacagtcgtctacgaatacctctgtcatacaaaaaaacaaattccgctcttgtccaaaaacggtctgtaaaaaccttatctagaccatgatacccactagttgaaggacttagtgatatataatttccatgactgtatgcacggttgggtccgtcaataaatataaggggaaggggttcacccagacaccaatgaagactaagtgttaataaattatttggtataaccgacgtgttccgagtcccaaatttgttaccatatacaaccgtgttagttaacaaaaattgtcaacatctatgatgagcgtcgtggttagaaagacacacacgaagatgatgaagaagataaggattacatatgtgtggatggtcaaaatttcttatacggtctgtacacctccttaaactaaacgtcaaatataaagttgacacattttattgtaattgatgtctccattacagtatgtaagtattatacttatggtgataaaacctcctaaccttaaaaccacaatgtggtggaggatgacgatcaaatcaactgtgtatggcaaaacaagttagacgacgacattgaacagttttcctgtggcgtggcggtcaatttgtcctgggaatactgtttgatttcaaaaccggacatctagaattcctttccaaaagacgtctagaactagtcaaaggaaaccctgcatttaaaaataacgttaatcctcgatctggattcgggtgatatccgggtgcgtttgcacgtcgcggacggggatggagatggggtagtggttttgcacaattcgcagcgttcagaaggtcttttatcacaacaaacaatacacaaacatacacacgtacaacatacaaaacataacaaacggacaaacatacaacacatatacatgtacaaacaaacagacgacatacacacataaacaaaaacatgtattatttcatacgtactgtcaaagtacacaccaacgtgggttactcattccatgacagggaaataacaaagaaacaggaataatgtgtaataatgtgtaacgggatgaatgtatccacacaaacaaggaagtaaaacaggacttacaggtcaaaacgtaaacgtgtaatataccgcaggtaaaataggaaatttaggaggtaaaacgacacgttggcaaaagccaatggaaccaaattggaatggaaaaacttgttaattagacaaatttgtagtcgttttgtcaattaggggtagaacaaaggaggatgtgcggatctgatgattgtgttgaatgtttgcggtttatcaatcagtagtaggacaggtccacgtgagattgttatgaacgtattgaaaccaccgcgggaacaattattttgtcgaaaatccgtgtataaaagtgacaaaaatgatgaaattaacgtattaaccgaacgttttgatgacacgttaggttcttacacagatattaaataacattttttgtactgattccaaaaacagtaacaattcgttggctttttccagcccgttcatgtacgtgtgaaagatgaataatgaaaaatgttagtatcattattttttcccacattggcttttgc

SEQ ID NO: 683 - DNA, 7896 bp, Papilloma virus
uaattutgguttttguuaugtatatttuuatuaauttttuttttuuugttguugtauugtgugaaautuutaggatgtgttgutggtatgtttgauggautaaautugtgttgtaauttataaggagaugtautataagugtagttaauauauaaaaugtttuuuuttgaugttutttututuuataaauttaaaugaaaattautgaataaatatuauatatututgauatgtgguataugtuguauagautttaugtaaagtaaaataugttutuattututtaattutataatatututaagguauatauututttgtaatutuugautttggttutgtgguaatgtautugaugautatgugauaatatutauggattttggagatauaggttgtutatttaatttugtatattgauttttttuttutaaggtattatatugauuttatatatgtuutgtuauaguauuuauaguutgggutugttutgtggattutgtugttgutgttuguguatuautttgtgauuauattttgttaugtauutggttttugttgtgaaauautgtaauaaaatutaaauuttggtgttttaatautuuttuaautggaauauaugatgutugttaatggautgaggutgaggututtautttttutauttggtutauutuaattagtaggaaaugatgatugatutgutugauttggtgtuguagtgttgtaauauauauauauaauattuauattattagttgaagtugatuatuatutttggagugttutguutaaugutuggaatgtugtugauaaatauutgtgtgataggaaauauauaggaaauauaugtugtttggtuattggaugttauuggutaaguuttuuatgtutauuuuttuuutguuuuaugttauutauuaaaaaauaugtuugttatuatutatttttttgtuuautgttttaaagtutautgutuutauttttaugttgtutatgtuuaagtutgaauuatutaaaataautautatggtgttgttaaauauatgtuugtutugugututgtugtgtuuggaauaaattauaugtuuttugggtttuuutaugtguuutttaugtauaaaattttgutttuaaauuuaugtuatatuttttgtuatuaututttuguuguugtuutttttttugattuagtggtaatgttutttatagtuatttauaattggtgggttttuatttttuttuuaattattgtuauggtutgtuguugatauugataagauttuauutttaugagututgagtuuattgguauututtatgauutttauuuutatugttauugtuauaaauatugutgtuagtttatutgauatugutgtugtuattgtauutauaauttttgtatuaaggttgtagggggtgattagttaauaatgtuaataatgtatugtttttattutttugtugatauataugttttaaatttuttaauatauuuaatagtaaagttutaaauuaatuutgtaaattttuautgtuttgatggauatugutaauuuattgguggtaaaaauuauaattaggttgauatugtuttuutaaattttgtaattatgttgggatauaugatataugtgtatatgttaugaatutaauaugtauuuutuatuattataatugtaataattutatatttauauuttttttatuttattgtuaaugttttuutgaatugtgtaatgatgtauatggtutatguaugtauaattaauttggtgggtttaauguatuauuauaaugtugtgatataauuatgtuttgtuuttauaggttataatuauttuaatatuuuutttguggguttauutatgtttutgattgttaatatgttgtauutuaautautatuguauaaautggauagtutttautatgttauuuguaaautattautggattgtutautttuautataaugtatauttataugtaattatugtutatuattatuattguggugaugtaaaaatttttugttgauggtuugttttatggattttutaauaugtuaatauauatuugtaatattttutugtgttttttutgtttautuatauagtgtuauutattttauututauautattttatuttutuuuuuututaauutttgggtatuatgttaaaaattutatagttuutuatuttaaatattguaaaaatauaugtaattttutaaaaaattttuuatggggtttttutttaaugtaauaugauauauuuggtugtttatgtuugttuagtatgaaauuttautuggaugatgtaaaaaatgttuuttgauattaaagtgtauatttaagtttatuagtgaaaauugatuttggaaattgtutaguatttaatugataugatutgutaugttgtutatuaauaauutgtataaaautatgtatataugutttaugaaauutauugttaggatattuauatutatutttugtatuugtggatuatgtttaatttauaggtggttaugaataatgtagtttatgtttaggtuaatgtutattgtuuauuggtataaatttatugtutaattauuataaatttaaaggtttgtttaauggtaaautgtttttatutttaggtuatatatgttaattautgtutttgauutttauaaaaaaautttuutguauuaugtutaatutaaauttgutuuttutuuttutaugtutgtuautauutgtgggaaagugtuguaaattuauauaatgtuutagtttataatuttgtaatauttttgutatuatttutgtaattauttgtgtatttgataauutttgauuauguatauuttttauattaaaataaaugtugttutututtgttatatgtatgtaatttggtggtuuauuauggttguaaaaauuauagatttttgttuugtauauttugataauttgaugtuagtttgguatgaaggtgauattaugggauaaaaaattttgtaaaaaatuuaugauaaauggtatuaagaauugtauaaagaaugtaauaggtaaugagtaaaaatttgagtuaaauauggtttgagagattguggtagaugtugttuuttttgtgttaugtaatgtgttugauutgtaaatatataatauatttautauatuutgtuauuauattttggtgtuutttauauutgaaaauuuutgatataatatttuauuttutuuttgtuuauatgatauattttaaatatgtautauggttttttatauuutgatgtutgttuauuuttuaugtaatattauugttuuaataautaauaatautgagatauaugtuatggtuautgutugttuataggtgaugauutagaagautugttgatagtatggggaggugttgugggggguttuggtguatgaauuugggggtttguauuttgguagtutguttutgauutttugutggttutgtuauauutatgtgtgtugtgggagtuagatggtuguauagtuauutgatgauautgttgggtuaguagguaaaugtaggtuugttgttgggugutguugtgtagggaaugtuattgtgatguggatattatgtgaattttuuautgtttttauuggaattuauaaattuuatatutaattuttttuatgtgauuaataaauttttataaaggagatggauugtaauutgtuutttgtutuutagtuggttttgtuugtaaaattgtaattgtatatgttugutttgtgttgugttauttaaaaatutatgauatttttaaggattatuauatgtttatgtauaauuuatatautuauauattauuaauaataugtttauattgtgttuggttatgaugaugatataauatatugautuutttautattgggaauataaauauauaauauaaauauaaaugaauauauauauaaugttauagggugaagaugttagauagatatauauaugtatatgtauuaatgatuataaauauatataauauuaatagtggaggagtatautuauaaaaaatgatatatataauaaaaaatattaaggtgauaatgatgatataugggtaugttatgauaggtatgttattaaugauatataauatttaatgtaaugtgauataauatgtuatataaaatttgtgtaataataaaaauaatuuauaauuaaaauaatgtaaatattattttgtauuaaagggtaguaugaugaguaguatttguauggagtugttgtutgaatatattttgaaugttugtuugtuuatgtaugggaagautauaataattatttuaauttuuatgttgaaatugautattttataaugtuauutggtuggatuuttataaaaatuuauutgatuuataauuatgauutagauuatgguuauugtuttgtuuuatgtatggaaatuuuuuuguatgtttgtgatatuatutauataguggaugatttggtggtuatuaataauttggauaauutggatgtutaggtagatatuaatgtaatuaautuutaagatuauaatattgtagauutuggggauggggttgtaaatgtuuatgaagtuutaaautttatagatggagatuatgttgttgtggtugauaaaauutatattggggttggagaagauaagtttaatuatugagatuaaaatatttaggaugtaaatgtutgggaagauagtaautuuaaggggtttgtuuautttaaagauuattatataattaatuatggggatggagauuaugtgtauugatauttutttaaggttaugtttguaaaugatguuttuuatgauuaaauuttgggtaatugtuatgggggttaggttgtuatguaguauauugauutggatutaauatgtuatuuugattagttgttuaaguuuauagattgugautgaaaaattgtguaggtaggtgtaaauaatgtatautattgggaugaatautaggttaautatgatgtaattgaaaautggggagtagtutuuaaggtutggguutgaaatauutatatuaaguaaaugtatuuggaugtaattgtaggtutgugtugtgauattuuaaatuatuugatuutgttguuugttggtauaaatggguatuauuatttgtttaauuuuggguauatgtaaaaatagtautatattugggatatggtgtaugauttutataauttaaugttggagaauaaagaagggtuugaugatgautautatatatautatatataugtutataatgtutauttugtggatgatuatgauggttgtgaugtaaatgttaaggatttagaagaaaagtttuaaauagtaattgtguuaguugtagatugtggaaaagtttauattgauaaggaaauugatgauggauuutauaaggauatttatgtuutgggutatatuaaaatggattatgattataauaauttgggtgaataagatgatgtgggaaatggtggtatgtuagataattatatuttuugtgtttaataaaaaatauuggatatataataaaaaatggaguatttguatttguauaagggataaaaaaatgtutauugagatauuguaagatuautgttgttuuauatagatggaggtggaaguuatugattuuaauagtugtgautautuatauagtggguatggtuataaaagatggtgugtuugtuaaggtutgaagaatgtuaauutgtaggtataaaatttuatggatttuuauuattauuatutgtuutauaaggattuuauagaugtatagttatgtutuataaatuuuaattuaatggautagggttatttaaauuggaaggtutattgtgtuatatautaggattgagagttgugaauuagauuuggauauatuuauaautttaguuaguuuuggttggaaatuuuuatuutgagtuauuagtaggtaatatattatttaauutautgtgauttttgagagtauatugtagaugauaautatggtttutatgtguautattauatagauauutaatatttgtttgagtugauauataataauugauauatggauggtaauututtgtgauutgtttuuugtgaugaauattuggatgatgauauuaagtuuugutaauaggaggtgatuttaattatttatgtggttaauttutauuautatauuatutgtgtuutatauuuugatauutgaaatttaauaaugtuutattgttttuauttuatggtaauutataaauagtuagataaauatttataggautaataaatgtttauagtugtutaugaatauututgtuatauaaaaaaauaaattuugututtgtuuaaaaauggtutgtaaaaauuttatutagauuatgatauuuautagttgaaggauttagtgatatataatttuuatgautgtatguauggttgggtuugtuaataaatataaggggaaggggttuauuuagauauuaatgaagautaagtgttaataaattatttggtataauugaugtgttuugagtuuuaaatttgttauuatatauaauugtgttagttaauaaaaattgtuaauatutatgatgagugtugtggttagaaagauauauaugaagatgatgaagaagataaggattauatatgtgtggatggtuaaaatttuttatauggtutgtauauutuuttaaautaaaugtuaaatataaagttgauauattttattgtaattgatgtutuuattauagtatgtaagtattatauttatggtgataaaauutuutaauuttaaaauuauaatgtggtggaggatgaugatuaaatuaautgtgtatgguaaaauaagttagaugaugauattgaauagttttuutgtggugtgguggtuaatttgtuutgggaatautgtttgatttuaaaauuggauatutagaattuutttuuaaaagaugtutagaautagtuaaaggaaauuutguatttaaaaataaugttaatuutugatutggattugggtgatatuugggtgugtttguaugtuguggauggggatggagatggggtagtggttttguauaattuguagugttuagaaggtuttttatuauaauaaauaatauauaaauatauauaugtauaauatauaaaauataauaaauggauaaauatauaauauatatauatgtauaaauaaauagaugauatauauauataaauaaaaauatgtattatttuataugtautgtuaaagtauauauuaaugtgggttautuattuuatgauagggaaataauaaagaaauaggaataatgtgtaataatgtgtaaugggatgaatgtatuuauauaaauaaggaagtaaaauaggauttauaggtuaaaaugtaaaugtgtaatatauuguaggtaaaataggaaatttaggaggtaaaaugauaugttgguaaaaguuaatggaauuaaattggaatggaaaaauttgttaattagauaaatttgtagtugttttgtuaattaggggtagaauaaaggaggatgtguggatutgatgattgtgttgaatgtttguggtttatuaatuagtagtaggauaggtuuaugtgagattgttatgaaugtattgaaauuauugugggaauaattattttgtugaaaatuugtgtataaaagtgauaaaaatgatgaaattaaugtattaauugaaugttttgatgauaugttaggttuttauauagatattaaataauattttttgtautgattuuaaaaauagtaauaattugttggutttttuuaguuugttuatgtaugtgtgaaagatgaataatgaaaaatgttagtatuattattttttuuuauattgguttttgu

SEQ ID NO: 684 - DNA, 7896 bp, Papilloma virus
taattttggtttttgttatgtatatttttattaatttttttttttttgttgttgtattgtgtgaaatttttaggatgtgttgttggtatgtttgatggattaaatttgtgttgtaatttataaggagatgtattataagtgtagttaatatataaaatgtttttttttgatgttttttttttttataaatttaaatgaaaattattgaataaatattatatatttttgatatgtggtatatgttgtatagattttatgtaaagtaaaatatgtttttatttttttaattttataatatttttaaggtatatatttttttgtaatttttgattttggttttgtggtaatgtatttgatgattatgtgataatatttatggattttggagatataggttgtttatttaattttgtatattgattttttttttttaaggtattatattgattttatatatgttttgttatagtatttatagtttgggtttgttttgtggattttgttgttgttgtttgtgtattattttgtgattatattttgttatgtatttggtttttgttgtgaaatattgtaataaaatttaaattttggtgttttaatatttttttaattggaatatatgatgtttgttaatggattgaggttgaggtttttattttttttatttggtttattttaattagtaggaaatgatgattgatttgtttgatttggtgttgtagtgttgtaatatatatatataatatttatattattagttgaagttgattattatttttggagtgttttgtttaatgtttggaatgttgttgataaatatttgtgtgataggaaatatataggaaatatatgttgtttggttattggatgttattggttaagttttttatgtttattttttttttgttttatgttatttattaaaaaatatgtttgttattatttatttttttgtttattgttttaaagtttattgtttttatttttatgttgtttatgtttaagtttgaattatttaaaataattattatggtgttgttaaatatatgtttgttttgtgttttgttgtgtttggaataaattatatgttttttgggtttttttatgtgttttttatgtataaaattttgtttttaaatttatgttatattttttgttattatttttttgttgttgtttttttttttgatttagtggtaatgttttttatagttatttataattggtgggtttttattttttttttaattattgttatggtttgttgttgatattgataagattttatttttatgagttttgagtttattggtattttttatgatttttatttttattgttattgttataaatattgttgttagtttatttgatattgttgttgttattgtatttataatttttgtattaaggttgtagggggtgattagttaataatgttaataatgtattgtttttatttttttgttgatatatatgttttaaattttttaatatatttaatagtaaagttttaaattaattttgtaaatttttattgttttgatggatattgttaatttattggtggtaaaaattataattaggttgatattgtttttttaaattttgtaattatgttgggatatatgatatatgtgtatatgttatgaatttaatatgtattttttattattataattgtaataattttatatttatattttttttattttattgttaatgtttttttgaattgtgtaatgatgtatatggtttatgtatgtataattaatttggtgggtttaatgtattattataatgttgtgatataattatgttttgtttttataggttataattattttaatattttttttgtgggtttatttatgtttttgattgttaatatgttgtattttaattattattgtataaattggatagtttttattatgttatttgtaaattattattggattgtttatttttattataatgtatatttatatgtaattattgtttattattattattgtggtgatgtaaaaattttttgttgatggtttgttttatggattttttaatatgttaatatatatttgtaatatttttttgtgttttttttgtttatttatatagtgttatttattttatttttatattattttatttttttttttttttaatttttgggtattatgttaaaaattttatagttttttattttaaatattgtaaaaatatatgtaattttttaaaaaattttttatggggtttttttttaatgtaatatgatatatttggttgtttatgtttgtttagtatgaaattttatttggatgatgtaaaaaatgttttttgatattaaagtgtatatttaagtttattagtgaaaattgattttggaaattgtttagtatttaattgatatgatttgttatgttgtttattaataatttgtataaaattatgtatatatgttttatgaaatttattgttaggatatttatatttattttttgtatttgtggattatgtttaatttataggtggttatgaataatgtagtttatgtttaggttaatgtttattgtttattggtataaatttattgtttaattattataaatttaaaggtttgtttaatggtaaattgtttttatttttaggttatatatgttaattattgtttttgatttttataaaaaaatttttttgtattatgtttaatttaaatttgttttttttttttttatgtttgttattatttgtgggaaagtgttgtaaatttatataatgttttagtttataattttgtaatatttttgttattatttttgtaattatttgtgtatttgataatttttgattatgtatattttttatattaaaataaatgttgtttttttttgttatatgtatgtaatttggtggtttattatggttgtaaaaattatagatttttgttttgtatattttgataatttgatgttagtttggtatgaaggtgatattatgggataaaaaattttgtaaaaaatttatgataaatggtattaagaattgtataaagaatgtaataggtaatgagtaaaaatttgagttaaatatggtttgagagattgtggtagatgttgttttttttgtgttatgtaatgtgtttgatttgtaaatatataatatatttattatattttgttattatattttggtgttttttatatttgaaaatttttgatataatattttattttttttttgtttatatgatatattttaaatatgtattatggttttttatattttgatgtttgtttattttttatgtaatattattgttttaataattaataatattgagatatatgttatggttattgtttgtttataggtgatgatttagaagatttgttgatagtatggggaggtgttgtggggggttttggtgtatgaatttgggggtttgtattttggtagtttgtttttgattttttgttggttttgttatatttatgtgtgttgtgggagttagatggttgtatagttatttgatgatattgttgggttagtaggtaaatgtaggtttgttgttgggtgttgttgtgtagggaatgttattgtgatgtggatattatgtgaattttttattgtttttattggaatttataaattttatatttaattttttttatgtgattaataaatttttataaaggagatggattgtaatttgttttttgttttttagttggttttgtttgtaaaattgtaattgtatatgtttgttttgtgttgtgttatttaaaaatttatgatatttttaaggattattatatgtttatgtataatttatatatttatatattattaataatatgtttatattgtgtttggttatgatgatgatataatatattgatttttttattattgggaatataaatatataatataaatataaatgaatatatatataatgttatagggtgaagatgttagatagatatatatatgtatatgtattaatgattataaatatatataatattaatagtggaggagtatatttataaaaaatgatatatataataaaaaatattaaggtgataatgatgatatatgggtatgttatgataggtatgttattaatgatatataatatttaatgtaatgtgatataatatgttatataaaatttgtgtaataataaaaataatttataattaaaataatgtaaatattattttgtattaaagggtagtatgatgagtagtatttgtatggagttgttgtttgaatatattttgaatgtttgtttgtttatgtatgggaagattataataattattttaatttttatgttgaaattgattattttataatgttatttggttggatttttataaaaatttatttgatttataattatgatttagattatggttattgttttgttttatgtatggaaatttttttgtatgtttgtgatattatttatatagtggatgatttggtggttattaataatttggataatttggatgtttaggtagatattaatgtaattaatttttaagattataatattgtagattttggggatggggttgtaaatgtttatgaagttttaaattttatagatggagattatgttgttgtggttgataaaatttatattggggttggagaagataagtttaattattgagattaaaatatttaggatgtaaatgtttgggaagatagtaattttaaggggtttgtttattttaaagattattatataattaattatggggatggagattatgtgtattgatatttttttaaggttatgtttgtaaatgatgttttttatgattaaattttgggtaattgttatgggggttaggttgttatgtagtatattgatttggatttaatatgttattttgattagttgtttaagtttatagattgtgattgaaaaattgtgtaggtaggtgtaaataatgtatattattgggatgaatattaggttaattatgatgtaattgaaaattggggagtagtttttaaggtttgggtttgaaatatttatattaagtaaatgtatttggatgtaattgtaggtttgtgttgtgatattttaaattatttgattttgttgtttgttggtataaatgggtattattatttgtttaattttgggtatatgtaaaaatagtattatatttgggatatggtgtatgatttttataatttaatgttggagaataaagaagggtttgatgatgattattatatatattatatatatgtttataatgtttattttgtggatgattatgatggttgtgatgtaaatgttaaggatttagaagaaaagttttaaatagtaattgtgttagttgtagattgtggaaaagtttatattgataaggaaattgatgatggattttataaggatatttatgttttgggttatattaaaatggattatgattataataatttgggtgaataagatgatgtgggaaatggtggtatgttagataattatattttttgtgtttaataaaaaatattggatatataataaaaaatggagtatttgtatttgtataagggataaaaaaatgtttattgagatattgtaagattattgttgttttatatagatggaggtggaagttattgattttaatagttgtgattatttatatagtgggtatggttataaaagatggtgtgtttgttaaggtttgaagaatgttaatttgtaggtataaaattttatggatttttattattattatttgttttataaggattttatagatgtatagttatgttttataaattttaatttaatggattagggttatttaaattggaaggtttattgtgttatatattaggattgagagttgtgaattagatttggatatatttataattttagttagttttggttggaaatttttattttgagttattagtaggtaatatattatttaatttattgtgatttttgagagtatattgtagatgataattatggtttttatgtgtattattatatagatatttaatatttgtttgagttgatatataataattgatatatggatggtaattttttgtgatttgttttttgtgatgaatatttggatgatgatattaagttttgttaataggaggtgattttaattatttatgtggttaatttttattattatattatttgtgttttatattttgatatttgaaatttaataatgttttattgtttttattttatggtaatttataaatagttagataaatatttataggattaataaatgtttatagttgtttatgaatatttttgttatataaaaaaataaattttgtttttgtttaaaaatggtttgtaaaaattttatttagattatgatatttattagttgaaggatttagtgatatataatttttatgattgtatgtatggttgggtttgttaataaatataaggggaaggggtttatttagatattaatgaagattaagtgttaataaattatttggtataattgatgtgttttgagttttaaatttgttattatatataattgtgttagttaataaaaattgttaatatttatgatgagtgttgtggttagaaagatatatatgaagatgatgaagaagataaggattatatatgtgtggatggttaaaattttttatatggtttgtatatttttttaaattaaatgttaaatataaagttgatatattttattgtaattgatgtttttattatagtatgtaagtattatatttatggtgataaaattttttaattttaaaattataatgtggtggaggatgatgattaaattaattgtgtatggtaaaataagttagatgatgatattgaatagtttttttgtggtgtggtggttaatttgttttgggaatattgtttgattttaaaattggatatttagaatttttttttaaaagatgtttagaattagttaaaggaaattttgtatttaaaaataatgttaatttttgatttggatttgggtgatatttgggtgtgtttgtatgttgtggatggggatggagatggggtagtggttttgtataatttgtagtgtttagaaggttttttattataataaataatatataaatatatatatgtataatatataaaatataataaatggataaatatataatatatatatatgtataaataaatagatgatatatatatataaataaaaatatgtattattttatatgtattgttaaagtatatattaatgtgggttatttattttatgatagggaaataataaagaaataggaataatgtgtaataatgtgtaatgggatgaatgtatttatataaataaggaagtaaaataggatttataggttaaaatgtaaatgtgtaatatattgtaggtaaaataggaaatttaggaggtaaaatgatatgttggtaaaagttaatggaattaaattggaatggaaaaatttgttaattagataaatttgtagttgttttgttaattaggggtagaataaaggaggatgtgtggatttgatgattgtgttgaatgtttgtggtttattaattagtagtaggataggtttatgtgagattgttatgaatgtattgaaattattgtgggaataattattttgttgaaaatttgtgtataaaagtgataaaaatgatgaaattaatgtattaattgaatgttttgatgatatgttaggtttttatatagatattaaataatattttttgtattgattttaaaaatagtaataatttgttggttttttttagtttgtttatgtatgtgtgaaagatgaataatgaaaaatgttagtattattatttttttttatattggtttttgt

SEQ ID NO: 685 - DNA, 7822 bp, Papilloma virus
atggcgctatttcacaaccctgaggaacggccatacaaattgccagacctgtgcaggacattggacactacattgcatgacgttacaatagactgtgtctattgcagaaggcaactacaacggacagaggtatatgaatttgcctttagtgacctatgtgtagtgtatagagacggggtaccatttgctgcatgccaatcatgtattaaattttatgctaaaatacgggaactacgatattactcggaatcggtgtatgcaactacattagaaaccataactaatacaaagttatataatttattgataaggtgcatgagttgcctgaaaccattgtgtccagcagaaaaactaaggcacctaacaacaaaacgaagattacataaaatagcaggaaactttacaggacagtgtcggcactgctggaccagtaagcgagaggaccgcagacgcatacgtcaagaaacacaagtttaagtaactatgcatggaccaaagcccaccgtgcaggaaattgtgttagagctatgtccatacaatgaaatacagccggttgaccttgtatgtcacgagcaattaggagattcagacgatgaaatagatgaacccgaccatgcagttaatcaccaccaacatctactactagccagacgggacgaacaacagcgtcacagaattcagtgtctgtgttgtaagtgtaacaaggcactgcaactagtagtagaagcgtcgcgggacaacctgcggacactacaacagctgtttatggactcactaaattttgtgtgtccgtggtgtgcaactgaaacccagtaatctgcaatggccaattgtgaaggtaccgatggggacgggacggggtgtaacggatggttttttgtagaagcaatagtagataaacaaacaggtgacacagtctcagaggatgaggacgaaaacgcaacagatacaggttcagacatggtagattttattgatgattctacacatatttgtatacaggcagagcgtgagacagcacaggtacttttgaatatgcaagaggcccaaagggatgcacaaagggtgcgtgccctaaaacgaaagtatacagacagtatagaaagcagtcctttagcaaagtcgccattacaggaattatcactaaatgtaagcagtacacaggcaagacaaccggcgtatacagtgccggacagcggctatggcaatatggaagtggaaactaactcggaggtaactgtagcacctaatataaatggggaggatggggaaaatgaaggggaaaatggcgacagtatacgggaggactgtagtagtgtggacagtgctatagatagtgaaaaccaggatcctaaatcacctactacccaacttaaagtattattacaatgtaacaataaaaaggctgcaatgttaacagaatttaaaaaagtatatggattgtcatttaatgacctggtacgtacatttaaaagtgataaaaccacatgtacagactgggtagcagcaatatttggagtaaatccaaccattgcggaagggtttaaaacactaattaaacaatatgcattgtatacccatatacaatgtttagatacaaaaactggaatattaatactaatgctaataagatacaaatgtggaaaaaatagaataacagtaggaaaaggattgagtacattgttgcatgttccagacagctgtatgcttttgcagccaccaaaattacgtagccctgttgcagcattatattggtatagaacaggaatatctaatattagtgaggtgtgtggcgacacgccggaatggataaaaagattaaccataatacaacatggaatagatgatagtgtatttgatttatcagacatggtacaatgggcatttgataatgagttaacagatgacagtgatatagcatttcaatatgctatgttagcagattgtaatagtaatgctgcagcgtttttaaaaagcaactgtcaagcaaaatatgtaaaagattgtgcaacaatgtgtagacattacaaacgggcgcaaaaacgacaaatgacaatgccacaatggattaaatttagatgcagtaaatgtgacgaaggcggtgattggcgcccaattgtacaatttttaagatatcaaggactggaatttataacatttttatgtgcattaaaagattttttaaaaggcacgccaaaacgaaattgtatagttatacatgggccgccaaatacaggcaagtcatatttttgcatgagccttatacattttttacaaggcacaataatttcatatgtaaattcagcaagtcacttttggttagagccacttgcagatgcaaaaatagccatgctagatgacgcaacaggtacatgctggtcatattttgataattacatgagaaatgcattagatggtaacccaataagtttagatagaaaacacagacacctaatacaaataaagtgtccaccaatgctaataacatccaatactaaccctgtagaagacaataggtggccgtatttacatagtagactaaccgtgtttaaatttcctaatgcatttccatttgaccaaaacaggaacccagtgtatacaatcaatgataaaaactggaaatgtttttttgaaaagacttggtgcagattagacttgcagcaggacgaggatgaaggagacaatgatggaaacactttcccaacgtttaaatgtgttacaggagaaaatattagaacattatgaacaggacagtaaatgtatacaggaccatattaactattggaattgtgtgcgactggaaaatgcaatatattatgcagcacgagaacgtggtatgcataatattgaccaccaggtggtgccgcctgtaaacatttcaaaaactaaagcatatcaagctattgaactgcagatggcactagagagccttgctaaaactgcatatagtgcagaggagtggacattaagggacacaagtaatgaactatggcatacaaagccaaagcaatgttttaaaaaacatggtgttacagtggaagtatggtatgatggggacaagagtaactcaatgcattatgtagtgtggggtacaatttactttaaaaacagtacagacacatggtgtaaaacccaagggcgtgtggattactggggtgtatattatatgtatgaacaacaaaaaacctattacgaaaggtttatgcaggatgcacaactatatgggactagtggaaaatgggacgtgcattataatggcaacataatccattgtcctgactctatgtgcagtaccactgacggaaaagtatccactactgaatctgttgccgacctacagaacaccaccgcgacccataccaccgcaggtgccccatgcaccaaaaaaacaaactcgacgtcgtctcggaagtatcccagacagtgcggaatcactgagccctctgagcccgacaacgtgtccgtggacggtgtcgacctcccactcctcagtagaagtgcaggccaaaacaaaagacggagcctttgttgtggtgacactacacctatagtgcatttaaaaggtgacaaaaatggattaaaatgtcttaggtataggttgcaaaaacataacgctttgtatgacaatatatcatgtacatggcattggataaggggtaggggatcaaccaatacaggtatattgactgtaacatatgtttcagaagcacaacgtgacaagtttttggaaactgttaaactaccatctagtgtaactgtgtcattggggtatatgacattataagtgtgtattgacccacactgtacactatatgtatattgtatacatatgcttgtattggtatttttggtgtggttttgtgtatgcatgtatatatgttgcactgtcccgcttttgcagtctgtgcatgtgtgtgtgtatgtgtggatatttgtgtttgtgtttatattagttagaactacaccatttgaggtgtttgctgtatacctacttttttttatactgcctatgtggttattacacagtcttactcttaatactatacagtaactgttatagtgtgcatttgtattgttgtttatttgtataaataaatatggtttcacaccgtgctgccaggcgcaagcgtgcatctgcaactgacttatataaaacatgtaaacaatcagggacatgtccttctgatgttataaataaggttgaaggtactacacttgcagacaaaatattacaatggacaagtttaggtatatttttgggtggcctgggtataggtactggctctggcaccggaggtcgtgctgggtacattcctttaggtggaaaacctaatactgttgtggatgtgtcgcctgcacgtccacctgtggttattgaacctgtgggtcctacggaaccctccattgtgcaattggtggaggattccagtgttattacatctgggacaccagtaccaacatttacaggcacctctgggtttgaaattacatcttcgtctaccactacaccggcagttttagacattaccccttcgtccgggtctgtgcaggtaagcagtactagttttactaaccctgcatttacagacccgactataatagaagtgccacaaacaggtgaggtgtctggtaatgtgtttgtaagtacccctacatcaggaacacatggatatgaggaaatacctatgcaggtatttgcaacacatggcactggtacagaacctattagtagtactcctatacctggggttagtcgtgtggcagggccacgtttatatagtagggcacatcaacaggttcgtgttagtaattttgattttgtaacgcacccttcatcatttgtaacatttgataatcctgcttttgagcctgttgatactactcttacatatgaacctgctgacatagctcctgatccggattttctggacattgttcgtttacataggcctgccttaacatcccgaagaggaacagtacgttttagcagagtaggcaaaaaggcgaccatgtttacacgccgaggtacacaaattggggcacaggtgcactattatcatgatattagtaacattacccctgctgacagcattgaactacaaccattggttgcccctgagcaggcggaccctatggataacttatatgatatatatgcacctgatactgacaatactacagtattagatactgcatttcataatgctacatttactactcgttcccacatatcagttccttcattggcttctgctgcatccactacatatactaatactaccattcctcttggtactgcttggaacacgcctgtaaatactggtcctgatgttgtattaccatctacaaccccacagttgcctttaacaccctctactccaattgatacaacctttgccataactatatatggttccaattattatttattaccattgttattctttttattaaaaaaacgtaaacaccttccttatttttttacagatggcattgtggcgagctagcgacaacatggtgtatttgcctcccccctcagtggcgaaggttgtcaatacagatgattatgtgacacgcactggcatgtattactatgctggtacatctaggttattaactgtaggccatccatattttaaggttcctatgtctgggggccgcaagcagggcattcctaaggtgtctgcatatcaatacagagtgtttagggttaccttacctgatcctaataaatttagtgttcctgagtctacattatataatccagatacacagcgcatggtatgggcctgtgttggtgttgaaataggtagggggcagccattgggcgttggccttagtgggcatccactatataataggctggatgatactgaaaattccccgttttcctctaataaaaatcctaaagacagtagggacaatgttgcagtggactgtaaacaaacacagctgtgtattataggctgtgttcctgctattggcgagcactgggccaaaggtaaatcttgtaagcctaccaatgtacaacaaggggactgtcccccattggaattggtaaatactcctattgaggatggcgatatgattgatacaggatatggtgctatggactttggtacattacaagaaacgaaaagcgaggtacctttggatatatgtcaatctgtttgcaaatatcctgactatttgcaaatgtctgcagatgtgtatggagacagtatgtttttttgtttacgtagggaacagttatttgccaggcatttttggaataggggaggcatggtaggggacactattcccactgacatgtatattaagggcactgacattcgtgaaactcctagtagttatgtgtatgccccctcgcctagcgggtctatggtgtcctctgactcccagttatttaacaagccctattggctgcacaaggcacagggacacaacaatggtatttgttggcataatcaattatttcttaccgttgtggatacaacgcgcagtactaattttacattgtccactactacagactctactgtaccagctgtgtatgattctaataaatttaaggaatatgttaggcatgttgaggaatatgatttgcagtttatatttcagttgtgtactataacattatccactgatgtaatgtcatatatacatactatgaatcctgctattttggatgattggaattttggtgttgcccctccaccatctgctagtcttgtagatacataccgctacctacaatcagcagcaattacatgtcaaaaggacgcccctgcacctgttaaaaaagatccctatgatggtcttaacttttggaatgtggatttaaaggaaaagtttagttctgaactggaccaattcccattaggacgcaaatttctgttacaggcaggtgttcgcagacggcccaccataggccctcgtaaacgcactgccactgcagctaccacatctacctctaaacacaaacgtaaacgtgtgtcaaaataattgttatatgtcttgttttgtatgttgtttgtctgtgtggttgtatatgtgtcatgttggtgttggtatgttgtgtatgtgcatgtatgtgtatgtgtatatgtgtatgtttgcaagtatgtgtgtataatctgtttttgttaataaagtatgtatgtccgtgtcctttgtggttgcaccctgtgactaacatatgtccttgttttacatataataggactgcaacatttcatacataatttgtagccctaccctaaggtgtgttacattatatgcaatatatttatggttgcaaactataccgtgtggccattttgtatggccgggttgtgtgcgaccgctttcggtcgttggtactatttgcttttagatagtattaaaacctatgtgtttcagcaaaaacatgttttaccttgagttacccacatagttggcaccagtaacagtcgtactggcgcaccttagttagtcatcatcctgtccaggtgcactgcaacaatagtttggcaaccaacgtatctcctcccttgtaataaaactgcttttaggcataaagttttaactgtttttgcttgcctaatagcatagttggccagtataactacttttgcattcaagaatctgtctggtagtgtaagttatacagtgactaatactacatccataaatttgtgcaaccgaaaaaggttgggcacacataccaatacttttacttataacattttacaattattctatataaaaaaagggtgggaccgaaaacggtcacgaccgaaaacggtgtatataaagctgaacacagcagttctctatacta

SEQ ID NO: 686 - DNA, 7822 bp, Papilloma virus
atggugutatttuauaauuutgaggaaugguuatauaaattguuagauutgtguaggauattggauautauattguatgaugttauaatagautgtgtutattguagaagguaautauaauggauagaggtatatgaatttguutttagtgauutatgtgtagtgtatagagauggggtauuatttgutguatguuaatuatgtattaaattttatgutaaaataugggaautaugatattautuggaatuggtgtatguaautauattagaaauuataautaatauaaagttatataatttattgataaggtguatgagttguutgaaauuattgtgtuuaguagaaaaautaagguauutaauaauaaaaugaagattauataaaataguaggaaautttauaggauagtgtugguautgutggauuagtaagugagaggauuguagauguataugtuaagaaauauaagtttaagtaautatguatggauuaaaguuuauugtguaggaaattgtgttagagutatgtuuatauaatgaaatauaguuggttgauuttgtatgtuaugaguaattaggagattuagaugatgaaatagatgaauuugauuatguagttaatuauuauuaauatutautautaguuagaugggaugaauaauagugtuauagaattuagtgtutgtgttgtaagtgtaauaagguautguaautagtagtagaagugtugugggauaauutguggauautauaauagutgtttatggautuautaaattttgtgtgtuugtggtgtguaautgaaauuuagtaatutguaatgguuaattgtgaaggtauugatggggaugggauggggtgtaauggatggttttttgtagaaguaatagtagataaauaaauaggtgauauagtutuagaggatgaggaugaaaauguaauagatauaggttuagauatggtagattttattgatgattutauauatatttgtatauagguagagugtgagauaguauaggtauttttgaatatguaagagguuuaaagggatguauaaagggtgugtguuutaaaaugaaagtatauagauagtatagaaaguagtuutttaguaaagtuguuattauaggaattatuautaaatgtaaguagtauauagguaagauaauuggugtatauagtguuggauaguggutatgguaatatggaagtggaaautaautuggaggtaautgtaguauutaatataaatggggaggatggggaaaatgaaggggaaaatggugauagtataugggaggautgtagtagtgtggauagtgutatagatagtgaaaauuaggatuutaaatuauutautauuuaauttaaagtattattauaatgtaauaataaaaaggutguaatgttaauagaatttaaaaaagtatatggattgtuatttaatgauutggtaugtauatttaaaagtgataaaauuauatgtauagautgggtaguaguaatatttggagtaaatuuaauuattguggaagggtttaaaauautaattaaauaatatguattgtatauuuatatauaatgtttagatauaaaaautggaatattaatautaatgutaataagatauaaatgtggaaaaaatagaataauagtaggaaaaggattgagtauattgttguatgttuuagauagutgtatguttttguaguuauuaaaattaugtaguuutgttguaguattatattggtatagaauaggaatatutaatattagtgaggtgtgtggugauauguuggaatggataaaaagattaauuataatauaauatggaatagatgatagtgtatttgatttatuagauatggtauaatggguatttgataatgagttaauagatgauagtgatataguatttuaatatgutatgttaguagattgtaatagtaatgutguagugtttttaaaaaguaautgtuaaguaaaatatgtaaaagattgtguaauaatgtgtagauattauaaauggguguaaaaaugauaaatgauaatguuauaatggattaaatttagatguagtaaatgtgaugaagguggtgattgguguuuaattgtauaatttttaagatatuaaggautggaatttataauatttttatgtguattaaaagattttttaaaagguauguuaaaaugaaattgtatagttatauatggguuguuaaatauagguaagtuatatttttguatgaguuttatauattttttauaagguauaataatttuatatgtaaattuaguaagtuauttttggttagaguuauttguagatguaaaaataguuatgutagatgauguaauaggtauatgutggtuatattttgataattauatgagaaatguattagatggtaauuuaataagtttagatagaaaauauagauauutaatauaaataaagtgtuuauuaatgutaataauatuuaatautaauuutgtagaagauaataggtgguugtatttauatagtagautaauugtgtttaaatttuutaatguatttuuatttgauuaaaauaggaauuuagtgtatauaatuaatgataaaaautggaaatgtttttttgaaaagauttggtguagattagauttguaguaggaugaggatgaaggagauaatgatggaaauautttuuuaaugtttaaatgtgttauaggagaaaatattagaauattatgaauaggauagtaaatgtatauaggauuatattaautattggaattgtgtgugautggaaaatguaatatattatguaguaugagaaugtggtatguataatattgauuauuaggtggtguuguutgtaaauatttuaaaaautaaaguatatuaagutattgaautguagatgguautagagaguuttgutaaaautguatatagtguagaggagtggauattaagggauauaagtaatgaautatgguatauaaaguuaaaguaatgttttaaaaaauatggtgttauagtggaagtatggtatgatggggauaagagtaautuaatguattatgtagtgtggggtauaatttautttaaaaauagtauagauauatggtgtaaaauuuaagggugtgtggattautggggtgtatattatatgtatgaauaauaaaaaauutattaugaaaggtttatguaggatguauaautatatgggautagtggaaaatgggaugtguattataatgguaauataatuuattgtuutgaututatgtguagtauuautgauggaaaagtatuuautautgaatutgttguugauutauagaauauuauugugauuuatauuauuguaggtguuuuatguauuaaaaaaauaaautugaugtugtutuggaagtatuuuagauagtguggaatuautgaguuututgaguuugauaaugtgtuugtggauggtgtugauutuuuautuutuagtagaagtguagguuaaaauaaaagauggaguutttgttgtggtgauautauauutatagtguatttaaaaggtgauaaaaatggattaaaatgtuttaggtataggttguaaaaauataaugutttgtatgauaatatatuatgtauatgguattggataaggggtaggggatuaauuaatauaggtatattgautgtaauatatgtttuagaaguauaaugtgauaagtttttggaaautgttaaautauuatutagtgtaautgtgtuattggggtatatgauattataagtgtgtattgauuuauautgtauautatatgtatattgtatauatatguttgtattggtatttttggtgtggttttgtgtatguatgtatatatgttguautgtuuuguttttguagtutgtguatgtgtgtgtgtatgtgtggatatttgtgtttgtgtttatattagttagaautauauuatttgaggtgtttgutgtatauutauttttttttatautguutatgtggttattauauagtuttaututtaatautatauagtaautgttatagtgtguatttgtattgttgtttatttgtataaataaatatggtttuauauugtgutguuagguguaagugtguatutguaautgauttatataaaauatgtaaauaatuagggauatgtuuttutgatgttataaataaggttgaaggtautauauttguagauaaaatattauaatggauaagtttaggtatatttttgggtgguutgggtataggtautggututgguauuggaggtugtgutgggtauattuutttaggtggaaaauutaatautgttgtggatgtgtuguutguaugtuuauutgtggttattgaauutgtgggtuutauggaauuutuuattgtguaattggtggaggattuuagtgttattauatutgggauauuagtauuaauatttauagguauututgggtttgaaattauatuttugtutauuautauauugguagttttagauattauuuuttugtuugggtutgtguaggtaaguagtautagttttautaauuutguatttauagauuugautataatagaagtguuauaaauaggtgaggtgtutggtaatgtgtttgtaagtauuuutauatuaggaauauatggatatgaggaaatauutatguaggtatttguaauauatgguautggtauagaauutattagtagtautuutatauutggggttagtugtgtgguaggguuaugtttatatagtaggguauatuaauaggttugtgttagtaattttgattttgtaauguauuuttuatuatttgtaauatttgataatuutguttttgaguutgttgatautaututtauatatgaauutgutgauatagutuutgatuuggattttutggauattgttugtttauatagguutguuttaauatuuugaagaggaauagtaugttttaguagagtagguaaaaaggugauuatgtttauauguugaggtauauaaattgggguauaggtguautattatuatgatattagtaauattauuuutgutgauaguattgaautauaauuattggttguuuutgaguagguggauuutatggataauttatatgatatatatguauutgatautgauaatautauagtattagatautguatttuataatgutauatttautautugttuuuauatatuagttuuttuattgguttutgutguatuuautauatatautaatautauuattuututtggtautguttggaauauguutgtaaatautggtuutgatgttgtattauuatutauaauuuuauagttguutttaauauuututautuuaattgatauaauutttguuataautatatatggttuuaattattatttattauuattgttattutttttattaaaaaaaugtaaauauuttuuttatttttttauagatgguattgtggugagutagugauaauatggtgtatttguutuuuuuutuagtggugaaggttgtuaatauagatgattatgtgauauguautgguatgtattautatgutggtauatutaggttattaautgtagguuatuuatattttaaggttuutatgtutggggguuguaaguaggguattuutaaggtgtutguatatuaatauagagtgtttagggttauuttauutgatuutaataaatttagtgttuutgagtutauattatataatuuagatauauaguguatggtatggguutgtgttggtgttgaaataggtaggggguaguuattgggugttgguuttagtggguatuuautatataataggutggatgatautgaaaattuuuugttttuututaataaaaatuutaaagauagtagggauaatgttguagtggautgtaaauaaauauagutgtgtattataggutgtgttuutgutattggugaguautggguuaaaggtaaatuttgtaaguutauuaatgtauaauaaggggautgtuuuuuattggaattggtaaatautuutattgaggatggugatatgattgatauaggatatggtgutatggautttggtauattauaagaaaugaaaagugaggtauutttggatatatgtuaatutgtttguaaatatuutgautatttguaaatgtutguagatgtgtatggagauagtatgtttttttgtttaugtagggaauagttatttguuagguatttttggaataggggagguatggtaggggauautattuuuautgauatgtatattaaggguautgauattugtgaaautuutagtagttatgtgtatguuuuutuguutagugggtutatggtgtuututgautuuuagttatttaauaaguuutattggutguauaagguauagggauauaauaatggtatttgttgguataatuaattatttuttauugttgtggatauaauguguagtautaattttauattgtuuautautauagaututautgtauuagutgtgtatgattutaataaatttaaggaatatgttagguatgttgaggaatatgatttguagtttatatttuagttgtgtautataauattatuuautgatgtaatgtuatatatauatautatgaatuutgutattttggatgattggaattttggtgttguuuutuuauuatutgutagtuttgtagatauatauugutauutauaatuaguaguaattauatgtuaaaaggauguuuutguauutgttaaaaaagatuuutatgatggtuttaauttttggaatgtggatttaaaggaaaagtttagttutgaautggauuaattuuuattaggauguaaatttutgttauagguaggtgttuguagaugguuuauuatagguuutugtaaauguautguuautguagutauuauatutauututaaauauaaaugtaaaugtgtgtuaaaataattgttatatgtuttgttttgtatgttgtttgtutgtgtggttgtatatgtgtuatgttggtgttggtatgttgtgtatgtguatgtatgtgtatgtgtatatgtgtatgtttguaagtatgtgtgtataatutgtttttgttaataaagtatgtatgtuugtgtuutttgtggttguauuutgtgautaauatatgtuuttgttttauatataataggautguaauatttuatauataatttgtaguuutauuutaaggtgtgttauattatatguaatatatttatggttguaaautatauugtgtgguuattttgtatgguugggttgtgtgugauugutttuggtugttggtautatttguttttagatagtattaaaauutatgtgtttuaguaaaaauatgttttauuttgagttauuuauatagttgguauuagtaauagtugtautgguguauuttagttagtuatuatuutgtuuaggtguautguaauaatagtttgguaauuaaugtatutuutuuuttgtaataaaautguttttagguataaagttttaautgtttttguttguutaataguatagttgguuagtataautauttttguattuaagaatutgtutggtagtgtaagttatauagtgautaatautauatuuataaatttgtguaauugaaaaaggttggguauauatauuaatauttttauttataauattttauaattattutatataaaaaaagggtgggauugaaaauggtuaugauugaaaauggtgtatataaagutgaauauaguagttututatauta

SEQ ID NO: 687 - DNA, 7822 bp, Papilloma virus
atggtgttattttataattttgaggaatggttatataaattgttagatttgtgtaggatattggatattatattgtatgatgttataatagattgtgtttattgtagaaggtaattataatggatagaggtatatgaatttgtttttagtgatttatgtgtagtgtatagagatggggtattatttgttgtatgttaattatgtattaaattttatgttaaaatatgggaattatgatattatttggaattggtgtatgtaattatattagaaattataattaatataaagttatataatttattgataaggtgtatgagttgtttgaaattattgtgtttagtagaaaaattaaggtatttaataataaaatgaagattatataaaatagtaggaaattttataggatagtgttggtattgttggattagtaagtgagaggattgtagatgtatatgttaagaaatataagtttaagtaattatgtatggattaaagtttattgtgtaggaaattgtgttagagttatgtttatataatgaaatatagttggttgattttgtatgttatgagtaattaggagatttagatgatgaaatagatgaatttgattatgtagttaattattattaatatttattattagttagatgggatgaataatagtgttatagaatttagtgtttgtgttgtaagtgtaataaggtattgtaattagtagtagaagtgttgtgggataatttgtggatattataatagttgtttatggatttattaaattttgtgtgtttgtggtgtgtaattgaaatttagtaatttgtaatggttaattgtgaaggtattgatggggatgggatggggtgtaatggatggttttttgtagaagtaatagtagataaataaataggtgatatagttttagaggatgaggatgaaaatgtaatagatataggtttagatatggtagattttattgatgattttatatatatttgtatataggtagagtgtgagatagtataggtatttttgaatatgtaagaggtttaaagggatgtataaagggtgtgtgttttaaaatgaaagtatatagatagtatagaaagtagttttttagtaaagttgttattataggaattattattaaatgtaagtagtatataggtaagataattggtgtatatagtgttggatagtggttatggtaatatggaagtggaaattaatttggaggtaattgtagtatttaatataaatggggaggatggggaaaatgaaggggaaaatggtgatagtatatgggaggattgtagtagtgtggatagtgttatagatagtgaaaattaggattttaaattatttattatttaatttaaagtattattataatgtaataataaaaaggttgtaatgttaatagaatttaaaaaagtatatggattgttatttaatgatttggtatgtatatttaaaagtgataaaattatatgtatagattgggtagtagtaatatttggagtaaatttaattattgtggaagggtttaaaatattaattaaataatatgtattgtatatttatatataatgtttagatataaaaattggaatattaatattaatgttaataagatataaatgtggaaaaaatagaataatagtaggaaaaggattgagtatattgttgtatgttttagatagttgtatgtttttgtagttattaaaattatgtagttttgttgtagtattatattggtatagaataggaatatttaatattagtgaggtgtgtggtgatatgttggaatggataaaaagattaattataatataatatggaatagatgatagtgtatttgatttattagatatggtataatgggtatttgataatgagttaatagatgatagtgatatagtattttaatatgttatgttagtagattgtaatagtaatgttgtagtgtttttaaaaagtaattgttaagtaaaatatgtaaaagattgtgtaataatgtgtagatattataaatgggtgtaaaaatgataaatgataatgttataatggattaaatttagatgtagtaaatgtgatgaaggtggtgattggtgtttaattgtataatttttaagatattaaggattggaatttataatatttttatgtgtattaaaagattttttaaaaggtatgttaaaatgaaattgtatagttatatatgggttgttaaatataggtaagttatatttttgtatgagttttatatattttttataaggtataataattttatatgtaaatttagtaagttatttttggttagagttatttgtagatgtaaaaatagttatgttagatgatgtaataggtatatgttggttatattttgataattatatgagaaatgtattagatggtaatttaataagtttagatagaaaatatagatatttaatataaataaagtgtttattaatgttaataatatttaatattaattttgtagaagataataggtggttgtatttatatagtagattaattgtgtttaaattttttaatgtatttttatttgattaaaataggaatttagtgtatataattaatgataaaaattggaaatgtttttttgaaaagatttggtgtagattagatttgtagtaggatgaggatgaaggagataatgatggaaatatttttttaatgtttaaatgtgttataggagaaaatattagaatattatgaataggatagtaaatgtatataggattatattaattattggaattgtgtgtgattggaaaatgtaatatattatgtagtatgagaatgtggtatgtataatattgattattaggtggtgttgtttgtaaatattttaaaaattaaagtatattaagttattgaattgtagatggtattagagagttttgttaaaattgtatatagtgtagaggagtggatattaagggatataagtaatgaattatggtatataaagttaaagtaatgttttaaaaaatatggtgttatagtggaagtatggtatgatggggataagagtaatttaatgtattatgtagtgtggggtataatttattttaaaaatagtatagatatatggtgtaaaatttaagggtgtgtggattattggggtgtatattatatgtatgaataataaaaaatttattatgaaaggtttatgtaggatgtataattatatgggattagtggaaaatgggatgtgtattataatggtaatataatttattgttttgattttatgtgtagtattattgatggaaaagtatttattattgaatttgttgttgatttatagaatattattgtgatttatattattgtaggtgttttatgtattaaaaaaataaatttgatgttgttttggaagtattttagatagtgtggaattattgagttttttgagtttgataatgtgtttgtggatggtgttgattttttattttttagtagaagtgtaggttaaaataaaagatggagtttttgttgtggtgatattatatttatagtgtatttaaaaggtgataaaaatggattaaaatgttttaggtataggttgtaaaaatataatgttttgtatgataatatattatgtatatggtattggataaggggtaggggattaattaatataggtatattgattgtaatatatgttttagaagtataatgtgataagtttttggaaattgttaaattattatttagtgtaattgtgttattggggtatatgatattataagtgtgtattgatttatattgtatattatatgtatattgtatatatatgtttgtattggtatttttggtgtggttttgtgtatgtatgtatatatgttgtattgttttgtttttgtagtttgtgtatgtgtgtgtgtatgtgtggatatttgtgtttgtgtttatattagttagaattatattatttgaggtgtttgttgtatatttatttttttttatattgtttatgtggttattatatagttttatttttaatattatatagtaattgttatagtgtgtatttgtattgttgtttatttgtataaataaatatggttttatattgtgttgttaggtgtaagtgtgtatttgtaattgatttatataaaatatgtaaataattagggatatgtttttttgatgttataaataaggttgaaggtattatatttgtagataaaatattataatggataagtttaggtatatttttgggtggtttgggtataggtattggttttggtattggaggttgtgttgggtatatttttttaggtggaaaatttaatattgttgtggatgtgttgtttgtatgtttatttgtggttattgaatttgtgggttttatggaattttttattgtgtaattggtggaggattttagtgttattatatttgggatattagtattaatatttataggtatttttgggtttgaaattatatttttgtttattattatattggtagttttagatattatttttttgtttgggtttgtgtaggtaagtagtattagttttattaattttgtatttatagatttgattataatagaagtgttataaataggtgaggtgtttggtaatgtgtttgtaagtatttttatattaggaatatatggatatgaggaaatatttatgtaggtatttgtaatatatggtattggtatagaatttattagtagtatttttatatttggggttagttgtgtggtagggttatgtttatatagtagggtatattaataggtttgtgttagtaattttgattttgtaatgtattttttattatttgtaatatttgataattttgtttttgagtttgttgatattatttttatatatgaatttgttgatatagtttttgatttggattttttggatattgtttgtttatataggtttgttttaatattttgaagaggaatagtatgttttagtagagtaggtaaaaaggtgattatgtttatatgttgaggtatataaattggggtataggtgtattattattatgatattagtaatattatttttgttgatagtattgaattataattattggttgtttttgagtaggtggattttatggataatttatatgatatatatgtatttgatattgataatattatagtattagatattgtattttataatgttatatttattatttgtttttatatattagtttttttattggtttttgttgtatttattatatatattaatattattattttttttggtattgtttggaatatgtttgtaaatattggttttgatgttgtattattatttataattttatagttgtttttaatattttttattttaattgatataatttttgttataattatatatggttttaattattatttattattattgttattttttttattaaaaaaatgtaaatattttttttatttttttatagatggtattgtggtgagttagtgataatatggtgtatttgtttttttttttagtggtgaaggttgttaatatagatgattatgtgatatgtattggtatgtattattatgttggtatatttaggttattaattgtaggttatttatattttaaggtttttatgtttgggggttgtaagtagggtatttttaaggtgtttgtatattaatatagagtgtttagggttattttatttgattttaataaatttagtgtttttgagtttatattatataatttagatatatagtgtatggtatgggtttgtgttggtgttgaaataggtagggggtagttattgggtgttggttttagtgggtatttattatataataggttggatgatattgaaaattttttgtttttttttaataaaaattttaaagatagtagggataatgttgtagtggattgtaaataaatatagttgtgtattataggttgtgtttttgttattggtgagtattgggttaaaggtaaattttgtaagtttattaatgtataataaggggattgttttttattggaattggtaaatatttttattgaggatggtgatatgattgatataggatatggtgttatggattttggtatattataagaaatgaaaagtgaggtatttttggatatatgttaatttgtttgtaaatattttgattatttgtaaatgtttgtagatgtgtatggagatagtatgtttttttgtttatgtagggaatagttatttgttaggtatttttggaataggggaggtatggtaggggatattatttttattgatatgtatattaagggtattgatatttgtgaaatttttagtagttatgtgtatgtttttttgtttagtgggtttatggtgttttttgatttttagttatttaataagttttattggttgtataaggtatagggatataataatggtatttgttggtataattaattattttttattgttgtggatataatgtgtagtattaattttatattgtttattattatagattttattgtattagttgtgtatgattttaataaatttaaggaatatgttaggtatgttgaggaatatgatttgtagtttatattttagttgtgtattataatattatttattgatgtaatgttatatatatatattatgaattttgttattttggatgattggaattttggtgttgtttttttattatttgttagttttgtagatatatattgttatttataattagtagtaattatatgttaaaaggatgtttttgtatttgttaaaaaagatttttatgatggttttaatttttggaatgtggatttaaaggaaaagtttagttttgaattggattaatttttattaggatgtaaatttttgttataggtaggtgtttgtagatggtttattataggtttttgtaaatgtattgttattgtagttattatatttatttttaaatataaatgtaaatgtgtgttaaaataattgttatatgttttgttttgtatgttgtttgtttgtgtggttgtatatgtgttatgttggtgttggtatgttgtgtatgtgtatgtatgtgtatgtgtatatgtgtatgtttgtaagtatgtgtgtataatttgtttttgttaataaagtatgtatgtttgtgttttttgtggttgtattttgtgattaatatatgtttttgttttatatataataggattgtaatattttatatataatttgtagttttattttaaggtgtgttatattatatgtaatatatttatggttgtaaattatattgtgtggttattttgtatggttgggttgtgtgtgattgtttttggttgttggtattatttgtttttagatagtattaaaatttatgtgttttagtaaaaatatgttttattttgagttatttatatagttggtattagtaatagttgtattggtgtattttagttagttattattttgtttaggtgtattgtaataatagtttggtaattaatgtatttttttttttgtaataaaattgtttttaggtataaagttttaattgtttttgtttgtttaatagtatagttggttagtataattatttttgtatttaagaatttgtttggtagtgtaagttatatagtgattaatattatatttataaatttgtgtaattgaaaaaggttgggtatatatattaatatttttatttataatattttataattattttatataaaaaaagggtgggattgaaaatggttatgattgaaaatggtgtatataaagttgaatatagtagttttttatatta

SEQ ID NO: 688 - DNA, 7822 bp, Papilloma virus
taccgcgataaagtgttgggactccttgccggtatgtttaacggtctggacacgtcctgtaacctgtgatgtaacgtactgcaatgttatctgacacagataacgtcttccgttgatgttgcctgtctccatatacttaaacggaaatcactggatacacatcacatatctctgccccatggtaaacgacgtacggttagtacataatttaaaatacgattttatgcccttgatgctataatgagccttagccacatacgttgatgtaatctttggtattgattatgtttcaatatattaaataactattccacgtactcaacggactttggtaacacaggtcgtctttttgattccgtggattgttgttttgcttctaatgtattttatcgtcctttgaaatgtcctgtcacagccgtgacgacctggtcattcgctctcctggcgtctgcgtatgcagttctttgtgttcaaattcattgatacgtacctggtttcgggtggcacgtcctttaacacaatctcgatacaggtatgttactttatgtcggccaactggaacatacagtgctcgttaatcctctaagtctgctactttatctacttgggctggtacgtcaattagtggtggttgtagatgatgatcggtctgccctgcttgttgtcgcagtgtcttaagtcacagacacaacattcacattgttccgtgacgttgatcatcatcttcgcagcgccctgttggacgcctgtgatgttgtcgacaaatacctgagtgatttaaaacacacaggcaccacacgttgactttgggtcattagacgttaccggttaacacttccatggctacccctgccctgccccacattgcctaccaaaaaacatcttcgttatcatctatttgtttgtccactgtgtcagagtctcctactcctgcttttgcgttgtctatgtccaagtctgtaccatctaaaataactactaagatgtgtataaacatatgtccgtctcgcactctgtcgtgtccatgaaaacttatacgttctccgggtttccctacgtgtttcccacgcacgggattttgctttcatatgtctgtcatatctttcgtcaggaaatcgtttcagcggtaatgtccttaatagtgatttacattcgtcatgtgtccgttctgttggccgcatatgtcacggcctgtcgccgataccgttataccttcacctttgattgagcctccattgacatcgtggattatatttacccctcctaccccttttacttccccttttaccgctgtcatatgccctcctgacatcatcacacctgtcacgatatctatcacttttggtcctaggatttagtggatgatgggttgaatttcataataatgttacattgttatttttccgacgttacaattgtcttaaattttttcatatacctaacagtaaattactggaccatgcatgtaaattttcactattttggtgtacatgtctgacccatcgtcgttataaacctcatttaggttggtaacgccttcccaaattttgtgattaatttgttatacgtaacatatgggtatatgttacaaatctatgtttttgaccttataattatgattacgattattctatgtttacaccttttttatcttattgtcatccttttcctaactcatgtaacaacgtacaaggtctgtcgacatacgaaaacgtcggtggttttaatgcatcgggacaacgtcgtaatataaccatatcttgtccttatagattataatcactccacacaccgctgtgcggccttacctatttttctaattggtattatgttgtaccttatctactatcacataaactaaatagtctgtaccatgttacccgtaaactattactcaattgtctactgtcactatatcgtaaagttatacgatacaatcgtctaacattatcattacgacgtcgcaaaaatttttcgttgacagttcgttttatacattttctaacacgttgttacacatctgtaatgtttgcccgcgtttttgctgtttactgttacggtgttacctaatttaaatctacgtcatttacactgcttccgccactaaccgcgggttaacatgttaaaaattctatagttcctgaccttaaatattgtaaaaatacacgtaattttctaaaaaattttccgtgcggttttgctttaacatatcaatatgtacccggcggtttatgtccgttcagtataaaaacgtactcggaatatgtaaaaaatgttccgtgttattaaagtatacatttaagtcgttcagtgaaaaccaatctcggtgaacgtctacgtttttatcggtacgatctactgcgttgtccatgtacgaccagtataaaactattaatgtactctttacgtaatctaccattgggttattcaaatctatcttttgtgtctgtggattatgtttatttcacaggtggttacgattattgtaggttatgattgggacatcttctgttatccaccggcataaatgtatcatctgattggcacaaatttaaaggattacgtaaaggtaaactggttttgtccttgggtcacatatgttagttactatttttgacctttacaaaaaaacttttctgaaccacgtctaatctgaacgtcgtcctgctcctacttcctctgttactacctttgtgaaagggttgcaaatttacacaatgtcctcttttataatcttgtaatacttgtcctgtcatttacatatgtcctggtataattgataaccttaacacacgctgaccttttacgttatataatacgtcgtgctcttgcaccatacgtattataactggtggtccaccacggcggacatttgtaaagtttttgatttcgtatagttcgataacttgacgtctaccgtgatctctcggaacgattttgacgtatatcacgtctcctcacctgtaattccctgtgttcattacttgataccgtatgtttcggtttcgttacaaaattttttgtaccacaatgtcaccttcataccatactacccctgttctcattgagttacgtaatacatcacaccccatgttaaatgaaatttttgtcatgtctgtgtaccacattttgggttcccgcacacctaatgaccccacatataatatacatacttgttgttttttggataatgctttccaaatacgtcctacgtgttgatataccctgatcaccttttaccctgcacgtaatattaccgttgtattaggtaacaggactgagatacacgtcatggtgactgccttttcataggtgatgacttagacaacggctggatgtcttgtggtggcgctgggtatggtggcgtccacggggtacgtggtttttttgtttgagctgcagcagagccttcatagggtctgtcacgccttagtgactcgggagactcgggctgttgcacaggcacctgccacagctggagggtgaggagtcatcttcacgtccggttttgttttctgcctcggaaacaacaccactgtgatgtggatatcacgtaaattttccactgtttttacctaattttacagaatccatatccaacgtttttgtattgcgaaacatactgttatatagtacatgtaccgtaacctattccccatcccctagttggttatgtccatataactgacattgtatacaaagtcttcgtgttgcactgttcaaaaacctttgacaatttgatggtagatcacattgacacagtaaccccatatactgtaatattcacacataactgggtgtgacatgtgatatacatataacatatgtatacgaacataaccataaaaaccacaccaaaacacatacgtacatatatacaacgtgacagggcgaaaacgtcagacacgtacacacacacatacacacctataaacacaaacacaaatataatcaatcttgatgtggtaaactccacaaacgacatatggatgaaaaaaaatatgacggatacaccaataatgtgtcagaatgagaattatgatatgtcattgacaatatcacacgtaaacataacaacaaataaacatatttatttataccaaagtgtggcacgacggtccgcgttcgcacgtagacgttgactgaatatattttgtacatttgttagtccctgtacaggaagactacaatatttattccaacttccatgatgtgaacgtctgttttataatgttacctgttcaaatccatataaaaacccaccggacccatatccatgaccgagaccgtggcctccagcacgacccatgtaaggaaatccaccttttggattatgacaacacctacacagcggacgtgcaggtggacaccaataacttggacacccaggatgccttgggaggtaacacgttaaccacctcctaaggtcacaataatgtagaccctgtggtcatggttgtaaatgtccgtggagacccaaactttaatgtagaagcagatggtgatgtggccgtcaaaatctgtaatggggaagcaggcccagacacgtccattcgtcatgatcaaaatgattgggacgtaaatgtctgggctgatattatcttcacggtgtttgtccactccacagaccattacacaaacattcatggggatgtagtccttgtgtacctatactcctttatggatacgtccataaacgttgtgtaccgtgaccatgtcttggataatcatcatgaggatatggaccccaatcagcacaccgtcccggtgcaaatatatcatcccgtgtagttgtccaagcacaatcattaaaactaaaacattgcgtgggaagtagtaaacattgtaaactattaggacgaaaactcggacaactatgatgagaatgtatacttggacgactgtatcgaggactaggcctaaaagacctgtaacaagcaaatgtatccggacggaattgtagggcttctccttgtcatgcaaaatcgtctcatccgtttttccgctggtacaaatgtgcggctccatgtgtttaaccccgtgtccacgtgataatagtactataatcattgtaatggggacgactgtcgtaacttgatgttggtaaccaacggggactcgtccgcctgggatacctattgaatatactatatatacgtggactatgactgttatgatgtcataatctatgacgtaaagtattacgatgtaaatgatgagcaagggtgtatagtcaaggaagtaaccgaagacgacgtaggtgatgtatatgattatgatggtaaggagaaccatgacgaaccttgtgcggacatttatgaccaggactacaacataatggtagatgttggggtgtcaacggaaattgtgggagatgaggttaactatgttggaaacggtattgatatataccaaggttaataataaataatggtaacaataagaaaaataatttttttgcatttgtggaaggaataaaaaaatgtctaccgtaacaccgctcgatcgctgttgtaccacataaacggaggggggagtcaccgcttccaacagttatgtctactaatacactgtgcgtgaccgtacataatgatacgaccatgtagatccaataattgacatccggtaggtataaaattccaaggatacagacccccggcgttcgtcccgtaaggattccacagacgtatagttatgtctcacaaatcccaatggaatggactaggattatttaaatcacaaggactcagatgtaatatattaggtctatgtgtcgcgtaccatacccggacacaaccacaactttatccatcccccgtcggtaacccgcaaccggaatcacccgtaggtgatatattatccgacctactatgacttttaaggggcaaaaggagattatttttaggatttctgtcatccctgttacaacgtcacctgacatttgtttgtgtcgacacataatatccgacacaaggacgataaccgctcgtgacccggtttccatttagaacattcggatggttacatgttgttcccctgacagggggtaaccttaaccatttatgaggataactcctaccgctatactaactatgtcctataccacgatacctgaaaccatgtaatgttctttgcttttcgctccatggaaacctatatacagttagacaaacgtttataggactgataaacgtttacagacgtctacacatacctctgtcatacaaaaaaacaaatgcatcccttgtcaataaacggtccgtaaaaaccttatcccctccgtaccatcccctgtgataagggtgactgtacatataattcccgtgactgtaagcactttgaggatcatcaatacacatacgggggagcggatcgcccagataccacaggagactgagggtcaataaattgttcgggataaccgacgtgttccgtgtccctgtgttgttaccataaacaaccgtattagttaataaagaatggcaacacctatgttgcgcgtcatgattaaaatgtaacaggtgatgatgtctgagatgacatggtcgacacatactaagattatttaaattccttatacaatccgtacaactccttatactaaacgtcaaatataaagtcaacacatgatattgtaataggtgactacattacagtatatatgtatgatacttaggacgataaaacctactaaccttaaaaccacaacggggaggtggtagacgatcagaacatctatgtatggcgatggatgttagtcgtcgttaatgtacagttttcctgcggggacgtggacaattttttctagggatactaccagaattgaaaaccttacacctaaatttccttttcaaatcaagacttgacctggttaagggtaatcctgcgtttaaagacaatgtccgtccacaagcgtctgccgggtggtatccgggagcatttgcgtgacggtgacgtcgatggtgtagatggagatttgtgtttgcatttgcacacagttttattaacaatatacagaacaaaacatacaacaaacagacacaccaacatatacacagtacaaccacaaccatacaacacatacacgtacatacacatacacatatacacatacaaacgttcatacacacatattagacaaaaacaattatttcatacatacaggcacaggaaacaccaacgtgggacactgattgtatacaggaacaaaatgtatattatcctgacgttgtaaagtatgtattaaacatcgggatgggattccacacaatgtaatatacgttatataaataccaacgtttgatatggcacaccggtaaaacataccggcccaacacacgctggcgaaagccagcaaccatgataaacgaaaatctatcataattttggatacacaaagtcgtttttgtacaaaatggaactcaatgggtgtatcaaccgtggtcattgtcagcatgaccgcgtggaatcaatcagtagtaggacaggtccacgtgacgttgttatcaaaccgttggttgcatagaggagggaacattattttgacgaaaatccgtatttcaaaattgacaaaaacgaacggattatcgtatcaaccggtcatattgatgaaaacgtaagttcttagacagaccatcacattcaatatgtcactgattatgatgtaggtatttaaacacgttggctttttccaacccgtgtgtatggttatgaaaatgaatattgtaaaatgttaataagatatatttttttcccaccctggcttttgccagtgctggcttttgccacatatatttcgacttgtgtcgtcaagagatatgat

SEQ ID NO: 689 - DNA, 7822 bp, Papilloma virus
tauugugataaagtgttgggautuuttguuggtatgtttaauggtutggauaugtuutgtaauutgtgatgtaaugtautguaatgttatutgauauagataaugtuttuugttgatgttguutgtutuuatatauttaaauggaaatuautggatauauatuauatatututguuuuatggtaaaugaugtauggttagtauataatttaaaataugattttatguuuttgatgutataatgaguuttaguuauataugttgatgtaatutttggtattgattatgtttuaatatattaaataautattuuaugtautuaauggautttggtaauauaggtugtutttttgattuugtggattgttgttttguttutaatgtattttatugtuutttgaaatgtuutgtuauaguugtgaugauutggtuattugututuutggugtutgugtatguagttutttgtgttuaaattuattgataugtauutggtttugggtgguaugtuutttaauauaatutugatauaggtatgttautttatgtugguuaautggaauatauagtgutugttaatuututaagtutgutautttatutauttgggutggtaugtuaattagtggtggttgtagatgatgatuggtutguuutguttgttgtuguagtgtuttaagtuauagauauaauattuauattgttuugtgaugttgatuatuatuttuguaguguuutgttggauguutgtgatgttgtugauaaatauutgagtgatttaaaauauauagguauuauaugttgautttgggtuattagaugttauuggttaauauttuuatggutauuuutguuutguuuuauattguutauuaaaaaauatuttugttatuatutatttgtttgtuuautgtgtuagagtutuutautuutguttttgugttgtutatgtuuaagtutgtauuatutaaaataautautaagatgtgtataaauatatgtuugtutuguaututgtugtgtuuatgaaaauttataugttutuugggtttuuutaugtgtttuuuauguaugggattttgutttuatatgtutgtuatatutttugtuaggaaatugtttuaguggtaatgtuuttaatagtgatttauattugtuatgtgtuugttutgttgguuguatatgtuaugguutgtuguugatauugttatauuttuauutttgattgaguutuuattgauatugtggattatatttauuuutuutauuuuttttauttuuuuttttauugutgtuatatguuutuutgauatuatuauauutgtuaugatatutatuauttttggtuutaggatttagtggatgatgggttgaatttuataataatgttauattgttatttttuugaugttauaattgtuttaaattttttuatatauutaauagtaaattautggauuatguatgtaaattttuautattttggtgtauatgtutgauuuatugtugttataaauutuatttaggttggtaauguuttuuuaaattttgtgattaatttgttataugtaauatatgggtatatgttauaaatutatgtttttgauuttataattatgattaugattattutatgtttauauuttttttatuttattgtuatuuttttuutaautuatgtaauaaugtauaaggtutgtugauataugaaaaugtuggtggttttaatguatugggauaaugtugtaatataauuatatuttgtuuttatagattataatuautuuauauauugutgtgugguuttauutatttttutaattggtattatgttgtauuttatutautatuauataaautaaatagtutgtauuatgttauuugtaaautattautuaattgtutautgtuautatatugtaaagttataugatauaatugtutaauattatuattaugaugtuguaaaaatttttugttgauagttugttttatauattttutaauaugttgttauauatutgtaatgtttguuugugtttttgutgtttautgttauggtgttauutaatttaaatutaugtuatttauautguttuuguuautaauugugggttaauatgttaaaaattutatagttuutgauuttaaatattgtaaaaatauaugtaattttutaaaaaattttuugtguggttttgutttaauatatuaatatgtauuugguggtttatgtuugttuagtataaaaaugtautuggaatatgtaaaaaatgttuugtgttattaaagtatauatttaagtugttuagtgaaaauuaatutuggtgaaugtutaugtttttatuggtaugatutautgugttgtuuatgtaugauuagtataaaautattaatgtaututttaugtaatutauuattgggttattuaaatutatuttttgtgtutgtggattatgtttatttuauaggtggttaugattattgtaggttatgattgggauatuttutgttatuuauugguataaatgtatuatutgattgguauaaatttaaaggattaugtaaaggtaaautggttttgtuuttgggtuauatatgttagttautatttttgauutttauaaaaaaauttttutgaauuaugtutaatutgaaugtugtuutgutuutauttuututgttautauutttgtgaaagggttguaaatttauauaatgtuututtttataatuttgtaatauttgtuutgtuatttauatatgtuutggtataattgataauuttaauauaugutgauuttttaugttatataataugtugtgututtguauuataugtattataautggtggtuuauuaugguggauatttgtaaagtttttgatttugtatagttugataauttgaugtutauugtgatututuggaaugattttgaugtatatuaugtutuutuauutgtaattuuutgtgttuattauttgatauugtatgtttuggtttugttauaaaattttttgtauuauaatgtuauuttuatauuatautauuuutgttutuattgagttaugtaatauatuauauuuuatgttaaatgaaatttttgtuatgtutgtgtauuauattttgggttuuuguauauutaatgauuuuauatataatatauatauttgttgttttttggataatgutttuuaaataugtuutaugtgttgatatauuutgatuauuttttauuutguaugtaatattauugttgtattaggtaauaggautgagatauaugtuatggtgautguuttttuataggtgatgauttagauaauggutggatgtuttgtggtggugutgggtatggtggugtuuauggggtaugtggtttttttgtttgagutguaguagaguuttuatagggtutgtuauguuttagtgautugggagautugggutgttguauagguauutguuauagutggagggtgaggagtuatuttuaugtuuggttttgttttutguutuggaaauaauauuautgtgatgtggatatuaugtaaattttuuautgtttttauutaattttauagaatuuatatuuaaugtttttgtattgugaaauatautgttatatagtauatgtauugtaauutattuuuuatuuuutagttggttatgtuuatataautgauattgtatauaaagtuttugtgttguautgttuaaaaauutttgauaatttgatggtagatuauattgauauagtaauuuuatatautgtaatattuauauataautgggtgtgauatgtgatatauatataauatatgtataugaauataauuataaaaauuauauuaaaauauataugtauatatatauaaugtgauagggugaaaaugtuagauaugtauauauauauatauauauutataaauauaaauauaaatataatuaatuttgatgtggtaaautuuauaaaugauatatggatgaaaaaaaatatgauggatauauuaataatgtgtuagaatgagaattatgatatgtuattgauaatatuauaugtaaauataauaauaaataaauatatttatttatauuaaagtgtgguaugauggtuugugttuguaugtagaugttgautgaatatattttgtauatttgttagtuuutgtauaggaagautauaatatttattuuaauttuuatgatgtgaaugtutgttttataatgttauutgttuaaatuuatataaaaauuuauuggauuuatatuuatgauugagauugtgguutuuaguaugauuuatgtaaggaaatuuauuttttggattatgauaauauutauauaguggaugtguaggtggauauuaataauttggauauuuaggatguuttgggaggtaauaugttaauuauutuutaaggtuauaataatgtagauuutgtggtuatggttgtaaatgtuugtggagauuuaaautttaatgtagaaguagatggtgatgtgguugtuaaaatutgtaatggggaaguagguuuagauaugtuuattugtuatgatuaaaatgattgggaugtaaatgtutgggutgatattatuttuauggtgtttgtuuautuuauagauuattauauaaauattuatggggatgtagtuuttgtgtauutatautuutttatggataugtuuataaaugttgtgtauugtgauuatgtuttggataatuatuatgaggatatggauuuuaatuaguauauugtuuuggtguaaatatatuatuuugtgtagttgtuuaaguauaatuattaaaautaaaauattgugtgggaagtagtaaauattgtaaautattaggaugaaaautuggauaautatgatgagaatgtatauttggaugautgtatugaggautagguutaaaagauutgtaauaaguaaatgtatuuggauggaattgtaggguttutuuttgtuatguaaaatugtutuatuugtttttuugutggtauaaatgtguggutuuatgtgtttaauuuugtgtuuaugtgataatagtautataatuattgtaatggggaugautgtugtaauttgatgttggtaauuaauggggautugtuuguutgggatauutattgaatatautatatataugtggautatgautgttatgatgtuataatutatgaugtaaagtattaugatgtaaatgatgaguaagggtgtatagtuaaggaagtaauugaagaugaugtaggtgatgtatatgattatgatggtaaggagaauuatgaugaauuttgtguggauatttatgauuaggautauaauataatggtagatgttggggtgtuaauggaaattgtgggagatgaggttaautatgttggaaauggtattgatatatauuaaggttaataataaataatggtaauaataagaaaaataatttttttguatttgtggaaggaataaaaaaatgtutauugtaauauugutugatugutgttgtauuauataaauggaggggggagtuauuguttuuaauagttatgtutautaatauautgtgugtgauugtauataatgataugauuatgtagatuuaataattgauatuuggtaggtataaaattuuaaggatauagauuuuuggugttugtuuugtaaggattuuauagaugtatagttatgtutuauaaatuuuaatggaatggautaggattatttaaatuauaaggautuagatgtaatatattaggtutatgtgtugugtauuatauuuggauauaauuauaautttatuuatuuuuugtuggtaauuuguaauuggaatuauuugtaggtgatatattatuugauutautatgauttttaagggguaaaaggagattatttttaggatttutgtuatuuutgttauaaugtuauutgauatttgtttgtgtugauauataatatuugauauaaggaugataauugutugtgauuuggtttuuatttagaauattuggatggttauatgttgttuuuutgauagggggtaauuttaauuatttatgaggataautuutauugutatautaautatgtuutatauuaugatauutgaaauuatgtaatgttutttguttttugutuuatggaaauutatatauagttagauaaaugtttataggautgataaaugtttauagaugtutauauatauututgtuatauaaaaaaauaaatguatuuuttgtuaataaauggtuugtaaaaauuttatuuuutuugtauuatuuuutgtgataagggtgautgtauatataattuuugtgautgtaaguautttgaggatuatuaatauauataugggggaguggatuguuuagatauuauaggagautgagggtuaataaattgttugggataauugaugtgttuugtgtuuutgtgttgttauuataaauaauugtattagttaataaagaatgguaauauutatgttgugugtuatgattaaaatgtaauaggtgatgatgtutgagatgauatggtugauauatautaagattatttaaattuuttatauaatuugtauaautuuttatautaaaugtuaaatataaagtuaauauatgatattgtaataggtgautauattauagtatatatgtatgatauttaggaugataaaauutautaauuttaaaauuauaauggggaggtggtagaugatuagaauatutatgtatggugatggatgttagtugtugttaatgtauagttttuutguggggaugtggauaattttttutagggatautauuagaattgaaaauuttauauutaaatttuuttttuaaatuaagauttgauutggttaagggtaatuutgugtttaaagauaatgtuugtuuauaagugtutguugggtggtatuugggaguatttgugtgauggtgaugtugatggtgtagatggagatttgtgtttguatttguauauagttttattaauaatatauagaauaaaauatauaauaaauagauauauuaauatatauauagtauaauuauaauuatauaauauatauaugtauatauauatauauatatauauatauaaaugttuatauauauatattagauaaaaauaattatttuatauatauagguauaggaaauauuaaugtgggauautgattgtatauaggaauaaaatgtatattatuutgaugttgtaaagtatgtattaaauatugggatgggattuuauauaatgtaatataugttatataaatauuaaugtttgatatgguauauuggtaaaauatauugguuuaauauaugutggugaaaguuaguaauuatgataaaugaaaatutatuataattttggatauauaaagtugtttttgtauaaaatggaautuaatgggtgtatuaauugtggtuattgtuaguatgauugugtggaatuaatuagtagtaggauaggtuuaugtgaugttgttatuaaauugttggttguatagaggagggaauattattttgaugaaaatuugtatttuaaaattgauaaaaaugaauggattatugtatuaauuggtuatattgatgaaaaugtaagttuttagauagauuatuauattuaatatgtuautgattatgatgtaggtatttaaauaugttggutttttuuaauuugtgtgtatggttatgaaaatgaatattgtaaaatgttaataagatatatttttttuuuauuutgguttttguuagtgutgguttttguuauatatatttugauttgtgtugtuaagagatatgat

SEQ ID NO: 690 - DNA, 7822 bp, Papilloma virus
tattgtgataaagtgttgggattttttgttggtatgtttaatggtttggatatgttttgtaatttgtgatgtaatgtattgtaatgttatttgatatagataatgttttttgttgatgttgtttgtttttatatatttaaatggaaattattggatatatattatatatttttgttttatggtaaatgatgtatggttagtatataatttaaaatatgattttatgtttttgatgttataatgagttttagttatatatgttgatgtaatttttggtattgattatgttttaatatattaaataattattttatgtatttaatggattttggtaatataggttgtttttttgattttgtggattgttgttttgtttttaatgtattttattgttttttgaaatgttttgttatagttgtgatgatttggttatttgtttttttggtgtttgtgtatgtagttttttgtgtttaaatttattgatatgtatttggttttgggtggtatgttttttaatataattttgatataggtatgttattttatgttggttaattggaatatatagtgtttgttaattttttaagtttgttattttatttatttgggttggtatgttaattagtggtggttgtagatgatgattggtttgttttgtttgttgttgtagtgttttaagttatagatataatatttatattgttttgtgatgttgattattatttttgtagtgttttgttggatgtttgtgatgttgttgataaatatttgagtgatttaaaatatataggtattatatgttgattttgggttattagatgttattggttaatatttttatggttatttttgttttgttttatattgtttattaaaaaatatttttgttattatttatttgtttgtttattgtgttagagttttttatttttgtttttgtgttgtttatgtttaagtttgtattatttaaaataattattaagatgtgtataaatatatgtttgttttgtattttgttgtgtttatgaaaatttatatgttttttgggtttttttatgtgttttttatgtatgggattttgtttttatatgtttgttatattttttgttaggaaattgttttagtggtaatgtttttaatagtgatttatatttgttatgtgtttgttttgttggttgtatatgttatggtttgttgttgatattgttatatttttatttttgattgagtttttattgatattgtggattatatttattttttttattttttttatttttttttttattgttgttatatgtttttttgatattattatatttgttatgatatttattatttttggttttaggatttagtggatgatgggttgaattttataataatgttatattgttatttttttgatgttataattgttttaaatttttttatatatttaatagtaaattattggattatgtatgtaaatttttattattttggtgtatatgtttgatttattgttgttataaattttatttaggttggtaatgtttttttaaattttgtgattaatttgttatatgtaatatatgggtatatgttataaatttatgtttttgattttataattatgattatgattattttatgtttatattttttttattttattgttattttttttttaatttatgtaataatgtataaggtttgttgatatatgaaaatgttggtggttttaatgtattgggataatgttgtaatataattatattttgtttttatagattataattattttatatattgttgtgtggttttatttatttttttaattggtattatgttgtattttatttattattatataaattaaatagtttgtattatgttatttgtaaattattatttaattgtttattgttattatattgtaaagttatatgatataattgtttaatattattattatgatgttgtaaaaattttttgttgatagtttgttttatatattttttaatatgttgttatatatttgtaatgtttgtttgtgtttttgttgtttattgttatggtgttatttaatttaaatttatgttatttatattgtttttgttattaattgtgggttaatatgttaaaaattttatagtttttgattttaaatattgtaaaaatatatgtaattttttaaaaaattttttgtgtggttttgttttaatatattaatatgtatttggtggtttatgtttgtttagtataaaaatgtatttggaatatgtaaaaaatgttttgtgttattaaagtatatatttaagttgtttagtgaaaattaattttggtgaatgtttatgtttttattggtatgatttattgtgttgtttatgtatgattagtataaaattattaatgtattttttatgtaatttattattgggttatttaaatttattttttgtgtttgtggattatgtttattttataggtggttatgattattgtaggttatgattgggatattttttgttatttattggtataaatgtattatttgattggtataaatttaaaggattatgtaaaggtaaattggttttgtttttgggttatatatgttagttattatttttgatttttataaaaaaatttttttgaattatgtttaatttgaatgttgttttgtttttattttttttgttattatttttgtgaaagggttgtaaatttatataatgtttttttttataattttgtaatatttgttttgttatttatatatgttttggtataattgataattttaatatatgttgattttttatgttatataatatgttgtgtttttgtattatatgtattataattggtggtttattatggtggatatttgtaaagtttttgattttgtatagtttgataatttgatgtttattgtgattttttggaatgattttgatgtatattatgtttttttatttgtaattttttgtgtttattatttgatattgtatgttttggttttgttataaaattttttgtattataatgttatttttatattatattatttttgtttttattgagttatgtaatatattatattttatgttaaatgaaatttttgttatgtttgtgtattatattttgggtttttgtatatttaatgattttatatataatatatatatttgttgttttttggataatgttttttaaatatgttttatgtgttgatatattttgattattttttattttgtatgtaatattattgttgtattaggtaataggattgagatatatgttatggtgattgtttttttataggtgatgatttagataatggttggatgttttgtggtggtgttgggtatggtggtgtttatggggtatgtggtttttttgtttgagttgtagtagagtttttatagggtttgttatgttttagtgatttgggagatttgggttgttgtataggtatttgttatagttggagggtgaggagttatttttatgtttggttttgttttttgttttggaaataatattattgtgatgtggatattatgtaaattttttattgtttttatttaattttatagaatttatatttaatgtttttgtattgtgaaatatattgttatatagtatatgtattgtaatttattttttattttttagttggttatgtttatataattgatattgtatataaagtttttgtgttgtattgtttaaaaatttttgataatttgatggtagattatattgatatagtaattttatatattgtaatatttatatataattgggtgtgatatgtgatatatatataatatatgtatatgaatataattataaaaattatattaaaatatatatgtatatatatataatgtgatagggtgaaaatgttagatatgtatatatatatatatatatttataaatataaatataaatataattaattttgatgtggtaaattttataaatgatatatggatgaaaaaaaatatgatggatatattaataatgtgttagaatgagaattatgatatgttattgataatattatatgtaaatataataataaataaatatatttatttatattaaagtgtggtatgatggtttgtgtttgtatgtagatgttgattgaatatattttgtatatttgttagtttttgtataggaagattataatatttattttaatttttatgatgtgaatgtttgttttataatgttatttgtttaaatttatataaaaatttattggatttatatttatgattgagattgtggtttttagtatgatttatgtaaggaaatttattttttggattatgataatatttatatagtggatgtgtaggtggatattaataatttggatatttaggatgttttgggaggtaatatgttaattattttttaaggttataataatgtagattttgtggttatggttgtaaatgtttgtggagatttaaattttaatgtagaagtagatggtgatgtggttgttaaaatttgtaatggggaagtaggtttagatatgtttatttgttatgattaaaatgattgggatgtaaatgtttgggttgatattatttttatggtgtttgtttattttatagattattatataaatatttatggggatgtagtttttgtgtatttatatttttttatggatatgtttataaatgttgtgtattgtgattatgttttggataattattatgaggatatggattttaattagtatattgttttggtgtaaatatattattttgtgtagttgtttaagtataattattaaaattaaaatattgtgtgggaagtagtaaatattgtaaattattaggatgaaaatttggataattatgatgagaatgtatatttggatgattgtattgaggattaggtttaaaagatttgtaataagtaaatgtatttggatggaattgtagggtttttttttgttatgtaaaattgttttatttgtttttttgttggtataaatgtgtggttttatgtgtttaattttgtgtttatgtgataatagtattataattattgtaatggggatgattgttgtaatttgatgttggtaattaatggggatttgtttgtttgggatatttattgaatatattatatatatgtggattatgattgttatgatgttataatttatgatgtaaagtattatgatgtaaatgatgagtaagggtgtatagttaaggaagtaattgaagatgatgtaggtgatgtatatgattatgatggtaaggagaattatgatgaattttgtgtggatatttatgattaggattataatataatggtagatgttggggtgttaatggaaattgtgggagatgaggttaattatgttggaaatggtattgatatatattaaggttaataataaataatggtaataataagaaaaataatttttttgtatttgtggaaggaataaaaaaatgtttattgtaatattgtttgattgttgttgtattatataaatggaggggggagttattgtttttaatagttatgtttattaatatattgtgtgtgattgtatataatgatatgattatgtagatttaataattgatatttggtaggtataaaattttaaggatatagatttttggtgtttgttttgtaaggattttatagatgtatagttatgttttataaattttaatggaatggattaggattatttaaattataaggatttagatgtaatatattaggtttatgtgttgtgtattatatttggatataattataattttatttattttttgttggtaatttgtaattggaattatttgtaggtgatatattatttgatttattatgatttttaaggggtaaaaggagattatttttaggatttttgttatttttgttataatgttatttgatatttgtttgtgttgatatataatatttgatataaggatgataattgtttgtgatttggtttttatttagaatatttggatggttatatgttgtttttttgatagggggtaattttaattatttatgaggataatttttattgttatattaattatgttttatattatgatatttgaaattatgtaatgttttttgttttttgttttatggaaatttatatatagttagataaatgtttataggattgataaatgtttatagatgtttatatatatttttgttatataaaaaaataaatgtattttttgttaataaatggtttgtaaaaattttattttttttgtattattttttgtgataagggtgattgtatatataatttttgtgattgtaagtattttgaggattattaatatatatatgggggagtggattgtttagatattataggagattgagggttaataaattgtttgggataattgatgtgttttgtgtttttgtgttgttattataaataattgtattagttaataaagaatggtaatatttatgttgtgtgttatgattaaaatgtaataggtgatgatgtttgagatgatatggttgatatatattaagattatttaaattttttatataatttgtataattttttatattaaatgttaaatataaagttaatatatgatattgtaataggtgattatattatagtatatatgtatgatatttaggatgataaaatttattaattttaaaattataatggggaggtggtagatgattagaatatttatgtatggtgatggatgttagttgttgttaatgtatagtttttttgtggggatgtggataattttttttagggatattattagaattgaaaattttatatttaaattttttttttaaattaagatttgatttggttaagggtaattttgtgtttaaagataatgtttgtttataagtgtttgttgggtggtatttgggagtatttgtgtgatggtgatgttgatggtgtagatggagatttgtgtttgtatttgtatatagttttattaataatatatagaataaaatatataataaatagatatattaatatatatatagtataattataattatataatatatatatgtatatatatatatatatatatatatataaatgtttatatatatatattagataaaaataattattttatatatataggtataggaaatattaatgtgggatattgattgtatataggaataaaatgtatattattttgatgttgtaaagtatgtattaaatattgggatgggattttatataatgtaatatatgttatataaatattaatgtttgatatggtatattggtaaaatatattggtttaatatatgttggtgaaagttagtaattatgataaatgaaaatttattataattttggatatataaagttgtttttgtataaaatggaatttaatgggtgtattaattgtggttattgttagtatgattgtgtggaattaattagtagtaggataggtttatgtgatgttgttattaaattgttggttgtatagaggagggaatattattttgatgaaaatttgtattttaaaattgataaaaatgaatggattattgtattaattggttatattgatgaaaatgtaagtttttagatagattattatatttaatatgttattgattatgatgtaggtatttaaatatgttggttttttttaatttgtgtgtatggttatgaaaatgaatattgtaaaatgttaataagatatattttttttttattttggtttttgttagtgttggtttttgttatatatattttgatttgtgttgttaagagatatgat

SEQ ID NO: 691 - DNA, 14 bp, Papilloma virus
atatatatatatat

SEQ ID NO: 692 - DNA, 14 bp, Papilloma virus
aaaaaaattttttt

SEQ ID NO: 693 - DNA, 10 bp, Papilloma virus
ggggaaattc

SEQ ID NO: 694 - DNA, 10 bp, Papilloma virus
gaatttcccc

SEQ ID NO: 695 - DNA, 10 bp, Papilloma virus
ggggaaattu

SEQ ID NO: 696 - DNA, 10 bp, Papilloma virus
gaatttuuuu

SEQ ID NO: 697 - DNA, 10 bp, Papilloma virus
ggggaaattt

SEQ ID NO: 698 - DNA, 10 bp, Papilloma virus
gaattttttt

SEQ ID NO: 699 - DNA, 10 bp, Papilloma virus
aaatttcccc

SEQ ID NO: 700 - DNA, 10 bp, Papilloma virus
aaaaaaattc

SEQ ID NO: 701 - DNA, 8 bp, Papilloma virus
ycayaaya

SEQ ID NO: 702 - DNA, 17 bp, Papilloma virus
  misc_feature (1)..(17): n
ngcncaggghcahaaya

SEQ ID NO: 703 - DNA, 17 bp, Papilloma virus
dgtdtagggytataata

SEQ ID NO: 704 - DNA, 20 bp, Papilloma virus
gatggygayatggtdgayay

SEQ ID NO: 705 - DNA, 20 bp, Papilloma virus
gatggtgatatggtdgatat

SEQ ID NO: 706 - DNA, 16 bp, Papilloma virus
actacaataattcatg

SEQ ID NO: 707 - DNA, 16 bp, Papilloma virus
autauaataattuatg

SEQ ID NO: 708 - DNA, 16 bp, Papilloma virus
attataataatttatg

SEQ ID NO: 709 - DNA, 16 bp, Papilloma virus
tgatgttattaagtac

SEQ ID NO: 710 - DNA, 16 bp, Papilloma virus
tgatgttattaagtau

SEQ ID NO: 711 - DNA, 16 bp, Papilloma virus
tgatgttattaagtat
